(19) United States
(12) Patent Application Publication
(10) Pub. No.: US 2026/0117224 A1
(43) Pub. Date: Apr. 30, 2026

(54) MODULATORY POLYNUCLEOTIDES

(71) Applicant: VOYAGER THERAPEUTICS, INC., Lexington, MA (US)

(72) Inventors: Dinah Wen-Yee Sah, Hopkinton, MA (US); Jinzhao Hou, Lexington, MA (US); Mathieu Nonnenmacher, Boston, MA (US)

(21) Appl. No.: 18/795,948

(22) Filed: Aug. 6, 2024

Related U.S. Application Data
(63) Continuation of application No. 17/519,126, filed on Nov. 4, 2021, now Pat. No. 12,084,659.
Application No. 17/519,126 is a continuation of application No. 16/749,293, filed on Jan. 22, 2020, now Pat. No. 11,193,129.
Application No. 16/749,293 is a continuation of application No. 16/302,146, now Pat. No. 10,584,337.
(60) Provisional application No. 62/338,137, filed on May 18, 2016.
(60) Provisional application No. 62/485,050, filed on Apr. 13, 2017.

(51) Int. Cl. C12N 15/113; C12N 15/11; C12N 15/85

(52) U.S. Cl. CPC C12N 15/113; C12N 15/111; C12N 15/85; C12N 2310/14; C12N 2310/141; C12N 2310/3519; C12N 2310/531; C12N 2310/533; C12N 2320/52; C12N 2750/14143

(57) ABSTRACT

The invention relates to compositions and methods for the preparation, manufacture and therapeutic use of modulatory polynucleotides.

### CROSS REFERENCE TO RELATED APPLICATIONS

[0001] This application is a continuation application which claims the benefit of U.S. patent application Ser. No. 17/519,126, filed Nov. 4, 2021, which is a continuation application which claims the benefit of U.S. patent application Ser. No. 16/749,293, filed Jan. 22, 2020, which is a continuation application which claims the benefit of U.S. patent application Ser. No. 16/302,146, filed Nov. 16, 2018 and entitled Modulatory Polynucleotides; which is a national stage filing under 35 U.S.C. § 371 of International Application No. PCT/US2017/033268, filed May 18, 2017 and entitled Modulatory Polynucleotides; which claims priority to U.S. Provisional Patent Application No. 62/338,137, filed on May 18, 2016, entitled Modulatory Polynucleotides, and U.S. Provisional Patent Application No. 62/485,050, filed on Apr. 13, 2017, entitled Modulatory Polynucleotides, the contents each of which are herein incorporated by reference in their entireties. REFERENCE TO THE SEQUENCE LISTING

[0002] The present application is being filed along with a Sequence Listing in electronic XML file format. The Sequence Listing is provided as a file entitled V2071-1039USCON3_SL.xml, created on Aug. 17, 2023, which is 2,338,197 bytes in size. The information in the electronic format of the sequence listing is incorporated herein by reference in its entirety.

### FIELD OF THE INVENTION

[0003] The invention relates to compositions, methods, processes, kits and devices for the design, preparation, manufacture and/or formulation of modulatory polynucleotides. In some embodiments such modulatory polynucleotides may be encoded by or within recombinant adeno-associated viruses (AAV) and may comprise artificial microRNAs, artificial pre-microRNAs and/or artificial pri-microRNAs.

### BACKGROUND OF THE INVENTION

[0004] MicroRNAs (or miRNAs or miRs) are small, non-coding, single stranded ribonucleic acid molecules (RNAs), which are usually 19-25 nucleotides in length. More than a thousand microRNAs have been identified in mammalian genomes. The mature microRNAs primarily bind to the 3′ untranslated region (3′-UTR) of target messenger RNAs (mRNAs) through partially or fully pairing with the complementary sequences of target mRNAs, promoting the degradation of target mRNAs at a post-transcriptional level, and in some cases, inhibiting the initiation of translation. MicroRNAs play a critical role in many key biological processes, such as the regulation of cell cycle and growth, apoptosis, cell proliferation and tissue development.

[0005] miRNA genes are generally transcribed as long primary transcripts of miRNAs (i.e. pri-miRNAs). The pri-miRNA is cleaved into a precursor of a miRNA (i.e. pre-miRNA) which is further processed to generate the mature and functional miRNA.

[0006] While many target expression strategies employ nucleic acid based modalities, there remains a need for improved nucleic acid modalities which have higher specificity and with fewer off target effects.

[0007] The present invention provides such improved modalities in the form of artificial pri-, pre- and mature microRNA constructs and methods of their design. These novel constructs may be synthetic stand-alone molecules or be encoded in a plasmid or expression vector for delivery to cells. Such vectors include, but are not limited to adeno-associated viral vectors such as vector genomes of any of the AAV serotypes or other viral delivery vehicles such as lentivirus, etc.

### SUMMARY OF THE INVENTION

[0008] Described herein are compositions, methods, processes, kits and devices for the design, preparation, manufacture and/or formulation of modulatory polynucleotides.

[0009] In some embodiments such modulatory polynucleotides may be encoded by or contained within plasmids or vectors or recombinant adeno-associated viruses (AAV) and may comprise artificial microRNAs, artificial pre-microRNAs and/or artificial pri-microRNAs.

[0010] The details of various embodiments of the invention are set forth in the description below. Other features, objects, and advantages of the invention will be apparent from the description and the drawings, and from the claims.

### BRIEF DESCRIPTION OF THE DRAWINGS

[0011] The foregoing and other objects, features and advantages will be apparent from the following description of particular embodiments of the invention, as illustrated in the accompanying drawings in which like reference characters refer to the same parts throughout the different views. The drawings are not necessarily to scale, emphasis instead being placed upon illustrating the principles of various embodiments of the invention.

[0012] FIG. 1 is a schematic of an artificial pri-microRNA that is part of a viral genome packaged in an AAV vector according to the present invention. FIG. 1 discloses SEQ ID NO: 943.

[0013] FIG. 2 is a diagram showing the location of the modulatory polynucleotide (MP) in relation to the ITRs, the intron (I) and the polyA (P).

### DETAILED DESCRIPTION

### I. Compositions of the Invention

### Modulatory Polynucleotides

[0014] According to the present invention, modulatory polynucleotides are provided which function as artificial microRNAs. As used herein a “modulatory polynucleotide” is any nucleic acid polymer which functions to modulate (either increase or decrease) the level or amount of a target gene. Modulatory polynucleotides include precursor molecules which are processed inside the cell prior to modulation. Modulatory polynucleotides or the processed forms thereof may be encoded in a plasmid, vector, genome or other nucleic acid expression vector for delivery to a cell.

[0015] In one embodiment, the modulatory polynucleotides may comprise at least one nucleic acid sequence encoding at least one siRNA molecule. The nucleic acids may, independently if there is more than one, encode 1, 2, 3, 4, 5, 6, 7, 8, 9, or more than 9 siRNA molecules.

[0016] In some embodiments modulatory polynucleotides are designed as primary microRNA (pri-miRs) or precursor microRNAs (pre-miRs) which are processed within the cell to produce highly specific artificial microRNAs.

[0017] The modulatory polynucleotides, especially the artificial microRNAs of the invention, may be designed based on the sequence or structure scaffold of a canonical or known microRNA, pri-microRNA or pre-microRNA. Such sequences may correspond to any known microRNA or its precursor such as those taught in US Publication US2005/0261218 and US Publication US2005/0059005, the contents of which are incorporated herein by reference in their entirety.

[0018] microRNAs (or miRNA or miRs) are 19-25 nucleotide long noncoding RNAs that bind to the 3′UTR of nucleic acid molecules and down-regulate gene expression either by reducing nucleic acid molecule stability or by inhibiting translation. The modulatory polynucleotides of the invention may comprise one or more microRNA sequences, microRNA seeds or artificial microRNAs, e.g., sequences which function as a microRNA.

[0019] A microRNA sequence comprises a “seed” region, i.e., a sequence in the region of positions 2-9 of the mature microRNA, which sequence has perfect Watson-Crick complementarity to the miRNA target sequence. A microRNA seed may comprise positions 2-8 or 2-7 or 2-9 of the mature microRNA. In some embodiments, a microRNA seed may comprise 7 nucleotides (e.g., nucleotides 2-8 of the mature microRNA), wherein the seed-complementary site in the corresponding miRNA target is flanked by an adenine (A) opposed to microRNA position 1. In some embodiments, a microRNA seed may comprise 6 nucleotides (e.g., nucleotides 2-7 of the mature microRNA), wherein the seed-complementary site in the corresponding miRNA target is flanked by an adenine (A) opposed to microRNA position 1. See for example, Grimson A, Farh K K, Johnston W K, Garrett-Engele P, Lim L P, Bartel D P; Mol Cell. 2007 Jul. 6; 27(1):91-105; each of which is herein incorporated by reference in their entirety. In naturally occurring microRNA, the bases of the microRNA seed have complete complementarity with the target sequence.

[0020] As taught herein, design parameters, or rules, have been identified and applied to design modulatory polynucleotides (e.g., artificial microRNAs) which have superior target gene modulatory properties with limited off target effects.

[0021] In one embodiment, the molecular scaffold of the modulatory polynucleotide described herein may be designed and optimized to create a modulatory polynucleotide that has the desired target gene modulatory properties. As a non-limiting example, the modulatory polynucleotide can have superior target gene modulatory properties with limited off target effects.

[0022] In one embodiment, the modulatory polynucleotides of the invention, such as artificial miRs, are comprised of modular elements or sequence motifs assembled according to a set of rules that result in highly specific target recognition and low guide/passenger ratio. Such modules or sequence motifs include, but are not limited to, double stranded regions, flanking regions, loops, optimized loops, UGUG loops, GU domains, spacers (to control proximal and distal motif or module spacing or to introduce structural elements such as turns, loops or bulges), CNNC motifs, and thermodynamic asymmetry regions which may embrace loops, bulges, mismatches, wobbles, and/or combinations thereof. Non limiting examples of rules which may be applied alone or in combination when constructing artificial miRs include those taught in Seitz et al. Silence 2011, 2:4; Gu, et al., Cell 151, 900-911, Nov. 9, 2012; Schwartz, et al., Cell, Vol. 115, 199-208, Oct. 17, 2003; Park, et al., Nature, Vol. 475, 101, 14 Jul. 2011; Ketley et al., 2013, PLoS ONE 8(6); Liu, et al., Nucleic Acids Research, 2008, Vol. 36, No. 9 2811-2824; Dow, et al., 2013, Nat Protoc.; 7(2): 374-393. doi:10.1038/nprot.2011.446; Auyeung, et al., Cell 152, 844-858, Feb. 14, 2013; Gu et al., Cell 2012 Nov. 9, 151(4):900-11; Fellmann et al. Molecular Cell 41, 733-746, 2011; Han et al. Cell 125, 887-907, 2006; Betancur et al. Frontiers in Genetics, Vol. 3, Art. 127, 1-6 Jul. 2012; Schwarz et al. Cell Vol 115, 199-208, 2003; the contents of each of which are herein incorporated by reference in their entirety.

[0023] In one embodiment, any of the known RNAi constructs or RNAi agents may serve as the starting construct for the design of the passenger and/or guide strand of a modulatory polynucleotides or artificial microRNAs of the invention. These include canonical siRNAs, small interfering RNAs (siRNA), double stranded RNAs (dsRNAs), inverted repeats, short hairpin RNAs (shRNAs), small temporally regulated RNAs (stRNA), clustered inhibitory RNAs (cRNAs), including radial clustered inhibitory RNA, asymmetric clustered inhibitory RNA, linear clustered inhibitory RNA, and complex or compound clustered inhibitory RNA, dicer substrates, DNA-directed RNAi (ddRNAi), single-stranded RNAi (ssRNAi), microRNA (miRNA) antagonists, microRNA mimics, microRNA agonists, blockmirs (a.k.a. Xmirs), microRNA mimetics, microRNA addbacks, supermiRs, the oligomeric constructs disclosed in PCT Publication WO/2005/013901 the contents of which are incorporated herein in their entirety, tripartite RNAi constructs such as those disclosed in US Publication 20090131360, the contents of which are incorporated herein in their entirety, the solo-rxRNA constructs disclosed in PCT Publication WO/2010/011346, the contents of which are incorporated herein by reference in their entirety; the sd-rxRNA constructs disclosed in PCT Publication WO/2010/033247 the contents of which are incorporated herein by reference in their entirety, dual acting RNAi constructs which reduce RNA levels and also modulate the immune response as disclosed in PCT Publications WO/2010/002851 and WO/2009/141146 the contents of which are incorporated herein by reference in their entirety and antigene RNAs (agRNA) or small activating RNAs (saRNAs) which increase expression of the target to which they are designed disclosed in PCT Publications WO/2006/130201, WO/2007/086990, WO/2009/046397, WO/2009/149182, WO/2009/086428 the contents of which are incorporated herein by reference in their entirety.

[0024] Likewise, any pri- or pre-microRNA precursor of the above listed microRNA may also serve as the molecular scaffold of the modulatory polynucleotides of the invention.

[0025] In one embodiment, the starting construct may be derived from any relevant species such as, not limited to, mouse, rat, dog, monkey or human.

[0026] In one embodiment, the modulatory polynucleotide may be located in an expression vector downstream of a promoter such as, but not limited to, CMV, U6, H1, CBA or a CBA promoter with a SV40 or a human betaGlobin intron. Further, the modulatory polynucleotide may also be located upstream of the polyadenylation sequence in an expression vector. As a non-limiting example, the modulatory polynucleotide may be located within 1, 2, 3, 4, 5, 6, 7, 8, 9, 10, 11, 12, 13, 14, 15, 16, 17, 18, 19, 20, 21, 22, 23, 24, 25, 26, 27, 28, 29, 30 or more than 30 nucleotides downstream from the promoter and/or upstream of the polyadenylation sequence in an expression vector. As another non-limiting example, the modulatory polynucleotide may be located within 1-5, 1-10, 1-15, 1-20, 1-25, 1-30, 5-10, 5-15, 5-20, 5-25, 5-30, 10-15, 10-20, 10-25, 10-30, 15-20, 15-25, 15-30, 20-25, 20-30 or 25-30 nucleotides downstream from the promoter and/or upstream of the polyadenylation sequence in an expression vector. As a non-limiting example, the modulatory polynucleotide may be located within the first 1%, 2%, 3%, 4%, 5%, 6%, 7%, 8%, 9%, 10%, 15%, 20%, 25% or more than 25% of the nucleotides downstream from the promoter and/or upstream of the polyadenylation sequence in an expression vector. As another non-limiting example, the modulatory polynucleotide may be located with the first 1-5%, 1-10%, 1-15%, 1-20%, 1-25%, 5-10%, 5-15%, 5-20%, 5-25%, 10-15%, 10-20%, 10-25%, 15-20%, 15-25%, or 20-25% downstream from the promoter and/or upstream of the polyadenylation sequence in an expression vector.

[0027] In one embodiment, the modulatory polynucleotide may be located upstream of the polyadenylation sequence in an expression vector. Further, the modulatory polynucleotide may be located downstream of a promoter such as, but not limited to, CMV, U6, H1, CBA or a CBA promoter with a SV40 or a human betaGlobin intron in an expression vector. As a non-limiting example, the modulatory polynucleotide may be located within 1, 2, 3, 4, 5, 6, 7, 8, 9, 10, 11, 12, 13, 14, 15, 16, 17, 18, 19, 20, 21, 22, 23, 24, 25, 26, 27, 28, 29, 30 or more than 30 nucleotides downstream from the promoter and/or upstream of the polyadenylation sequence in an expression vector. As another non-limiting example, the modulatory polynucleotide may be located within 1-5, 1-10, 1-15, 1-20, 1-25, 1-30, 5-10, 5-15, 5-20, 5-25, 5-30, 10-15, 10-20, 10-25, 10-30, 15-20, 15-25, 15-30, 20-25, 20-30 or 25-30 nucleotides downstream from the promoter and/or upstream of the polyadenylation sequence in an expression vector. As a non-limiting example, the modulatory polynucleotide may be located within the first 1%, 2%, 3%, 4%, 5%, 6%, 7%, 8%, 9%, 10%, 15%, 20%, 25% or more than 25% of the nucleotides downstream from the promoter and/or upstream of the polyadenylation sequence in an expression vector. As another non-limiting example, the modulatory polynucleotide may be located with the first 1-5%, 1-10%, 1-15%, 1-20%, 1-25%, 5-10%, 5-15%, 5-20%, 5-25%, 10-15%, 10-20%, 10-25%, 15-20%, 15-25%, or 20-25% downstream from the promoter and/or upstream of the polyadenylation sequence in an expression vector.

[0028] In one embodiment, the modulatory polynucleotide may be located in a scAAV.

[0029] In one embodiment, the modulatory polynucleotide may be located in an ssAAV.

[0030] In one embodiment, the modulatory polynucleotide may be located near the 5′ end of the flip ITR in an expression vector. In another embodiment, the modulatory polynucleotide may be located near the 3′end of the flip ITR in an expression vector. In yet another embodiment, the modulatory polynucleotide may be located near the 5′ end of the flop ITR in an expression vector. In yet another embodiment, the modulatory polynucleotide may be located near the 3′ end of the flop ITR in an expression vector. In one embodiment, the modulatory polynucleotide may be located between the 5′ end of the flip ITR and the 3′ end of the flop ITR in an expression vector. In one embodiment, the modulatory polynucleotide may be located between (e.g., half-way between the 5′ end of the flip ITR and 3′ end of the flop ITR or the 3′ end of the flop ITR and the 5′ end of the flip ITR), the 3′ end of the flip ITR and the 5′ end of the flip ITR in an expression vector. As a non-limiting example, the modulatory polynucleotide may be located within 1, 2, 3, 4, 5, 6, 7, 8, 9, 10, 11, 12, 13, 14, 15, 16, 17, 18, 19, 20, 21, 22, 23, 24, 25, 26, 27, 28, 29, 30 or more than 30 nucleotides downstream from the 5′ or 3′ end of an ITR (e.g., Flip or Flop ITR) in an expression vector. As a non-limiting example, the modulatory polynucleotide may be located within 1, 2, 3, 4, 5, 6, 7, 8, 9, 10, 11, 12, 13, 14, 15, 16, 17, 18, 19, 20, 21, 22, 23, 24, 25, 26, 27, 28, 29, 30 or more than 30 nucleotides upstream from the 5′ or 3′ end of an ITR (e.g., Flip or Flop ITR) in an expression vector. As another non-limiting example, the modulatory polynucleotide may be located within 1-5, 1-10, 1-15, 1-20, 1-25, 1-30, 5-10, 5-15, 5-20, 5-25, 5-30, 10-15, 10-20, 10-25, 10-30, 15-20, 15-25, 15-30, 20-25, 20-30 or 25-30 nucleotides downstream from the 5′ or 3′ end of an ITR (e.g., Flip or Flop ITR) in an expression vector. As another non-limiting example, the modulatory polynucleotide may be located within 1-5, 1-10, 1-15, 1-20, 1-25, 1-30, 5-10, 5-15, 5-20, 5-25, 5-30, 10-15, 10-20, 10-25, 10-30, 15-20, 15-25, 15-30, 20-25, 20-30 or 25-30 upstream from the 5′ or 3′ end of an ITR (e.g., Flip or Flop ITR) in an expression vector. As a non-limiting example, the modulatory polynucleotide may be located within the first 1%, 2%, 3%, 4%, 5%, 6%, 7%, 8%, 9%, 10%, 15%, 20%, 25% or more than 25% of the nucleotides upstream from the 5′ or 3′ end of an ITR (e.g., Flip or Flop ITR) in an expression vector. As another non-limiting example, the modulatory polynucleotide may be located with the first 1-5%, 1-10%, 1-15%, 1-20%, 1-25%, 5-10%, 5-15%, 5-20%, 5-25%, 10-15%, 10-20%, 10-25%, 15-20%, 15-25%, or 20-25% downstream from the 5′ or 3′ end of an ITR (e.g., Flip or Flop ITR) in an expression vector.

[0031] In addition to the modules or sequence motifs, modulatory polynucleotides comprise at least one of or both a passenger and guide strand. The passenger and guide strand may be positioned or located on the 5′ arm or 3′ arm of a stem loop structure of the modulatory polynucleotide.

[0032] In one embodiment, the 3′ stem arm of the modulatory polynucleotides may have 11 nucleotides downstream of the 3′ end of the guide strand which have complementarity to the 11 of the 13 nucleotides upstream of the 5′ end of the passenger strand in the 5′ stem arm.

[0033] In one embodiment, the modulatory polynucleotides may have a cysteine which is 6 nucleotides downstream of the 3′ end of the 3′ stem arm of the modulatory polynucleotide.

[0034] In one embodiment, the modulatory polynucleotides comprise a miRNA seed match for the guide strand. In another embodiment, the modulatory polynucleotides comprise a miRNA seed match for the passenger strand. In yet another embodiment, the modulatory polynucleotides do no comprise a seed match for the guide or passenger strand.

[0035] In one embodiment, the modulatory polynucleotides may have almost no significant full-length off targets for the guide strand. In another embodiment, the modulatory polynucleotides may have almost no significant full-length off targets for the passenger strand. In yet another embodiment, the modulatory polynucleotides may have almost no significant full-length off targets for the guide strand or the passenger strand.

[0036] In one embodiment, the modulatory polynucleotides may have high activity in vitro. In another embodiment, the modulatory polynucleotides may have low activity in vitro. In yet another embodiment, the modulatory polynucleotides may have high guide strand activity and low passenger strand activity in vitro.

[0037] In one embodiment, the modulatory polynucleotides have a high guide strand activity and low passenger strand activity in vitro. The target knock-down (KD) by the guide strand may be at least 60%, 65%, 70%, 75%, 80%, 85%, 90%, 95%, 99%, 99.5% or 100%. The target knock-down by the guide strand may be 60-65%, 60-70%, 60-75%, 60-80%, 60-85%, 60-90%, 60-95%, 60-99%, 60-99.5%, 60-100%, 65-70%, 65-75%, 65-80%, 65-85%, 65-90%, 65-95%, 65-99%, 65-99.5%, 65-100%, 70-75%, 70-80%, 70-85%, 70-90%, 70-95%, 70-99%, 70-99.5%, 70-100%, 75-80%, 75-85%, 75-90%, 75-95%, 75-99%, 75-99.5%, 75-100%, 80-85%, 80-90%, 80-95%, 80-99%, 80-99.5%, 80-100%, 85-90%, 85-95%, 85-99%, 85-99.5%, 85-100%, 90-95%, 90-99%, 90-99.5%, 90-100%, 95-99%, 95-99.5%, 95-100%, 99-99.5%, 99-100% or 99.5-100%. As a non-limiting example, the target knock-down (KD) by the guide strand is greater than 70%.

[0038] In one embodiment, the IC50 of the passenger strand for the nearest off target is greater than 100 multiplied by the IC50 of the guide strand for the target. As a non-limiting example, if the IC50 of the passenger strand for the nearest off target is greater than 100 multiplied by the IC50 of the guide strand for the target then the modulatory polynucleotide is said to have high guide strand activity and a low passenger strand activity in vitro.

[0039] In one embodiment, the 5′ processing of the guide strand has a correct start (n) at the 5′ end at least 75%, 80%, 85%, 90%, 95%, 99% or 100% of the time in vitro or in vivo. As a non-limiting example, the 5′ processing of the guide strand is precise and has a correct start (n) at the 5′ end at least 99% of the time in vitro. As a non-limiting example, the 5′ processing of the guide strand is precise and has a correct start (n) at the 5′ end at least 99% of the time in vivo.

[0040] In one embodiment, the guide-to-passenger (G:P) strand ratio is 1:10, 1:9, 1:8, 1:7, 1:6, 1:5, 1:4, 1:3, 1:2, 1;1, 2:10, 2:9, 2:8, 2:7, 2:6, 2:5, 2:4, 2:3, 2:2, 2:1, 3:10, 3:9, 3:8, 3:7, 3:6, 3:5, 3:4, 3:3, 3:2, 3:1, 4:10, 4:9, 4:8, 4:7, 4:6, 4:5, 4:4, 4:3, 4:2, 4:1, 5:10, 5:9, 5:8, 5:7, 5:6, 5:5, 5:4, 5:3, 5:2, 5:1, 6:10, 6:9, 6:8, 6:7, 6:6, 6:5, 6:4, 6:3, 6:2, 6:1, 7:10, 7:9, 7:8, 7:7, 7:6, 7:5, 7:4, 7:3, 7:2, 7:1, 8:10, 8:9, 8:8, 8:7, 8:6, 8:5, 8:4, 8:3, 8:2, 8:1, 9:10, 9:9, 9:8, 9:7, 9:6, 9:5, 9:4, 9:3, 9:2, 9:1, 10:10, 10:9, 10:8, 10:7, 10:6, 10:5, 10:4, 10:3, 10:2, 10:1, 1:99, 5:95, 10:90, 15:85, 20:80, 25:75, 30:70, 35:65, 40:60, 45:55, 50:50, 55:45, 60:40, 65:35, 70:30, 75:25, 80:20, 85:15, 90:10, 95:5, or 99:1 in vitro or in vivo.

[0041] The guide to passenger ratio refers to the ratio of the guide strands to the passenger strands after the excision of the guide strand. For example, a 80:20 guide to passenger ratio would have 8 guide strands to every 2 passenger strands clipped out of the precursor. As a non-limiting example, the guide-to-passenger strand ratio is 8:2 in vitro. As a non-limiting example, the guide-to-passenger strand ratio is 8:2 in vivo. As a non-limiting example, the guide-to-passenger strand ratio is 9:1 in vitro. As a non-limiting example, the guide-to-passenger strand ratio is 9:1 in vivo.

[0042] In one embodiment, the guide to passenger (G:P) (also referred to as the antisense to sense) strand ratio expressed is greater than 1.

[0043] In one embodiment, the guide to passenger (G:P) (also referred to as the antisense to sense) strand ratio expressed is greater than 2.

[0044] In one embodiment, the guide to passenger (G:P) (also referred to as the antisense to sense) strand ratio expressed is greater than 5.

[0045] In one embodiment, the guide to passenger (G:P) (also referred to as the antisense to sense) strand ratio expressed is greater than 10.

[0046] In one embodiment, the guide to passenger (G:P) (also referred to as the antisense to sense) strand ratio expressed is greater than 20.

[0047] In one embodiment, the guide to passenger (G:P) (also referred to as the antisense to sense) strand ratio expressed is greater than 50.

[0048] In one embodiment, the guide to passenger (G:P) (also referred to as the antisense to sense) strand ratio expressed is at least 3:1.

[0049] In one embodiment, the guide to passenger (G:P) (also referred to as the antisense to sense) strand ratio expressed is at least 5:1.

[0050] In one embodiment, the guide to passenger (G:P) (also referred to as the antisense to sense) strand ratio expressed is at least 10:1.

[0051] In one embodiment, the guide to passenger (G:P) (also referred to as the antisense to sense) strand ratio expressed is at least 20:1.

[0052] In one embodiment, the guide to passenger (G:P) (also referred to as the antisense to sense) strand ratio expressed is at least 50:1.

[0053] In one embodiment, the passenger to guide (P:G) (also referred to as the sense to antisense) strand ratio expressed is 1:10, 1:9, 1:8, 1:7, 1:6, 1:5, 1:4, 1:3, 1:2, 1;1, 2:10, 2:9, 2:8, 2:7, 2:6, 2:5, 2:4, 2:3, 2:2, 2:1, 3:10, 3:9, 3:8, 3:7, 3:6, 3:5, 3:4, 3:3, 3:2, 3:1, 4:10, 4:9, 4:8, 4:7, 4:6, 4:5, 4:4, 4:3, 4:2, 4:1, 5:10, 5:9, 5:8, 5:7, 5:6, 5:5, 5:4, 5:3, 5:2, 5:1, 6:10, 6:9, 6:8, 6:7, 6:6, 6:5, 6:4, 6:3, 6:2, 6:1, 7:10, 7:9, 7:8, 7:7, 7:6, 7:5, 7:4, 7:3, 7:2, 7:1, 8:10, 8:9, 8:8, 8:7, 8:6, 8:5, 8:4, 8:3, 8:2, 8:1, 9:10, 9:9, 9:8, 9:7, 9:6, 9:5, 9:4, 9:3, 9:2, 9:1, 10:10, 10:9, 10:8, 10:7, 10:6, 10:5, 10:4, 10:3, 10:2, 10:1, 1:99, 5:95, 10:90, 15:85, 20:80, 25:75, 30:70, 35:65, 40:60, 45:55, 50:50, 55:45, 60:40, 65:35, 70:30, 75:25, 80:20, 85:15, 90:10, 95:5, or 99:1 in vitro or in vivo. The passenger to guide ratio refers to the ratio of the passenger strands to the guide strands after the excision of the guide strand. For example, a 80:20 passenger to guide ratio would have 8 passenger strands to every 2 guide strands clipped out of the precursor. As a non-limiting example, the passenger-to-guide strand ratio is 80:20 in vitro. As a non-limiting example, the passenger-to-guide strand ratio is 80:20 in vivo. As a non-limiting example, the passenger-to-guide strand ratio is 8:2 in vitro. As a non-limiting example, the passenger-to-guide strand ratio is 8:2 in vivo. As a non-limiting example, the passenger-to-guide strand ratio is 9:1 in vitro. As a non-limiting example, the passenger-to-guide strand ratio is 9:1 in vivo.

[0054] In one embodiment, the passenger to guide (P:G) (also referred to as the sense to antisense) strand ratio expressed is greater than 1.

[0055] In one embodiment, the passenger to guide (P:G) (also referred to as the sense to antisense) strand ratio expressed is greater than 2.

[0056] In one embodiment, the passenger to guide (P:G) (also referred to as the sense to antisense) strand ratio expressed is greater than 5.

[0057] In one embodiment, the passenger to guide (P:G) (also referred to as the sense to antisense) strand ratio expressed is greater than 10.

[0058] In one embodiment, the passenger to guide (P:G) (also referred to as the sense to antisense) strand ratio expressed is greater than 20.

[0059] In one embodiment, the passenger to guide (P:G) (also referred to as the sense to antisense) strand ratio expressed is greater than 50.

[0060] In one embodiment, the passenger to guide (P:G) (also referred to as the sense to antisense) strand ratio expressed is at least 3:1.

[0061] In one embodiment, the passenger to guide (P:G) (also referred to as the sense to antisense) strand ratio expressed is at least 5:1.

[0062] In one embodiment, the passenger to guide (P:G) (also referred to as the sense to antisense) strand ratio expressed is at least 10:1.

[0063] In one embodiment, the passenger to guide (P:G) (also referred to as the sense to antisense) strand ratio expressed is at least 20:1.

[0064] In one embodiment, the passenger to guide (P:G) (also referred to as the sense to antisense) strand ratio expressed is at least 50:1.

[0065] In one embodiment, a passenger-guide strand duplex is considered effective when the prior pre-microRNAs demonstrate, but methods known in the art and described herein, greater than 2-fold guide to passenger strand ratio when processing is measured. As a non-limiting examples, the pri- or pre-microRNAs demonstrate great than 2-fold, 3-fold, 4-fold, 5-fold, 6-fold, 7-fold, 8-fold, 9-fold, 10-fold, 11-fold, 12-fold, 13-fold, 14-fold, 15-fold, or 2 to 5-fold, 2 to 10-fold, 2 to 15-fold, 3 to 5-fold, 3 to 10-fold, 3 to 15-fold, 4 to 5-fold, 4 to 10-fold, 4 to 15-fold, 5 to 10-fold, 5 to 15-fold, 6 to 10-fold, 6 to 15-fold, 7 to 10-fold, 7 to 15-fold, 8 to 10-fold, 8 to 15-fold, 9 to 10-fold, 9 to 15-fold, 10 to 15-fold, 11 to 15-fold, 12 to 15-fold, 13 to 15-fold, or 14 to 15-fold guide to passenger strand ratio when processing is measured.

[0066] In one embodiment, the integrity of the vector genome is at least 60%, 65%, 70%, 75%, 80%, 85%, 90%, 95%, 99% or more than 99% of the full length of the construct.

### Target Nucleic Acids

[0067] The modulatory polynucleotides of the invention may be targeted to any gene or nucleic acid construct including coding and non-coding genes. Genes (DNA or mRNA) that encode human or primate proteins may be targeted. Further, non-coding genes may also be targeted, e.g., long noncoding RNAs (lncRNA).

[0068] Examples of such lncRNA molecules and RNAi constructs designed to target such lncRNA any of which may be targeted by or encoded in the modulatory polynucleotides, respectively are taught in International Publication, WO2012/018881 A2, the contents of which are incorporated herein by reference in their entirety.

[0069] In one embodiment, the modulatory polynucleotides of the invention may target any gene known in the art. As a non-limiting example, the gene may be SOD1.

[0070] In one embodiment, the modulatory polynucleotides of the invention may target any gene known in the art. As a non-limiting example, the gene may be Htt.

[0071] In one embodiment, the modulatory polynucleotide may be designed to target any gene or mRNA in the human genome, e.g., genes associated with CNS disorders such as, but not limited to, Huntington's Disease, ALS and the like.

### Molecular Scaffolds

[0072] In some embodiments the starting molecular scaffold of the modulatory polynucleotide is a known or wild type pri- or pre-microRNA. In other embodiments the molecular scaffold of the modulatory polynucleotides is designed ab initio. (See Cullen, Gene Therapy (2006) 13, 503-508 work with miR30; Chung, et al., Nucleic Acids Research, 2006, Vol. 34, No. 7 working with miR-155; the contents of which are herein incorporated by reference in their entirety).

[0073] As used herein a “molecular scaffold” is a framework or starting molecule that forms the sequence or structural basis against which to design or make a subsequent molecule.

[0074] The modulatory polynucleotides of the present invention may be designed as a pri-miR as shown in FIG. 1. In the figure, a pri-miR molecular scaffold is shown. The modulatory polynucleotide which comprises the payload (e.g., siRNA, miRNA or other RNAi agent described herein) comprises a leading 5′ flanking sequence which may be of any length and may be derived in whole or in part from wild type microRNA sequence or be completely artificial.

[0075] In one embodiment, the molecular scaffold comprises at least one 5′ flanking region. As a non-limiting example, the 5′ flanking region may comprise a 5′ flanking sequence which may be of any length and may be derived in whole or in part from wild type microRNA sequence or be a completely artificial sequence.

[0076] In one embodiment, the molecular scaffold comprises at least one 3′ flanking region. As a non-limiting example, the 3′ flanking region may comprise a 3′ flanking sequence which may be of any length and may be derived in whole or in part from wild type microRNA sequence or be a completely artificial sequence.

[0077] In one embodiment, the molecular scaffold comprises at least one loop motif region. As a non-limiting example, the loop motif region may comprise a sequence which may be of any length.

[0078] In one embodiment, the molecular scaffold comprises a 5′ flanking region, a loop motif region and/or a 3′ flanking region.

[0079] In one embodiment, at least one payload (e.g., siRNA, miRNA or other RNAi agent described herein) may be encoded by a modulatory polynucleotide which may also comprise at least one molecular scaffold. The molecular scaffold may comprise a 5′ flanking sequence and/or a 3′ flanking sequence which may be of any length and may be derived in whole or in part from wild type microRNA sequence or be completely artificial. The 3′ flanking sequence may mirror the 5′ flanking sequence in size and origin. Either flanking sequence may be absent. The 3′ flanking sequence may optionally contain one or more CNNC motifs, where “N” represents any nucleotide.

[0080] Forming the stem of the stem loop structure shown is a minimum of the modulatory polynucleotide encoding at least one payload sequence. In some embodiments the payload sequence comprises at least one nucleic acid sequence which is in part complementary or will hybridize to a target sequence. In some embodiments the payload is a wild type microRNA. In some embodiments the payload is an siRNA molecule or fragment of an siRNA molecule. In some embodiments the payload is a substantially double stranded construct which may comprise one or more microRNAs, artificial microRNAs or siRNAs.

[0081] In some embodiments, the 5′ arm of the stem loop of the modulatory polynucleotide comprises a nucleic acid sequence encoding a passenger strand. This strand is also known as the sense strand in that it reflects an identity to a target. The passenger strand may be between 15-30 nucleotides in length. It may be 15, 16, 17, 18, 19, 20, 21, 22, 23, 24, 25, 26, 27, 28, 29 or 30 nucleotides in length.

[0082] In some embodiments, the 3′ arm of the stem loop of the modulatory polynucleotide comprises a nucleic acid sequence encoding a guide strand. This strand is also known as the antisense strand in that it reflects homology to a target. The guide strand may be between 15-30 nucleotides in length, 21-25 nucleotides or 22 nucleotides in length. It may be 15, 16, 17, 18, 19, 20, 21, 22, 23, 24, 25, 26, 27, 28, 29 or 30 nucleotides in length. The guide strand, in some instances, comprises a “G” nucleotide at the 5′ most end.

[0083] In some embodiments, where the guide strand comprises a microRNA, or artificial microRNAs, the guide strand may comprise one or more microRNA seed sequences. The seed sequence may be located at positions 2-7, 2-8 or 2-9 of the guide strand relative to the first 5′ nucleotide of the guide strand or relative to a dicer cleavage site.

[0084] In other embodiments, the passenger strand may reside on the 3′ arm while the guide strand resides on the 5′ arm of the stem of the stem loop structure of the modulatory polynucleotide.

[0085] The passenger and guide strands may be completely complementary across a substantial portion of their length. In other embodiments the passenger strand and guide strand may be at least 70, 80, 90, 95 or 99% complementary across independently at least 50, 60, 70, 80, 85, 90, 95, or 99% of the length of the strands.

[0086] Neither the identity of the passenger strand nor the homology of the guide strand need be 100% complementary to the target sequence.

[0087] In one embodiment, separating the passenger and guide strand of the stem loop structure of the modulatory polynucleotide is a loop sequence (also known as a loop motif, linker or linker motif). The loop sequence may be of any length, between 4-30 nucleotides, between 4-20 nucleotides, between 4-15 nucleotides, between 5-15 nucleotides, between 6-12 nucleotides, 6 nucleotides, 7, nucleotides, 8 nucleotides, 9 nucleotides, 10 nucleotides, 11 nucleotides, 12 nucleotides, 13 nucleotides, 14 nucleotides, and/or 15 nucleotides.

[0088] In some embodiments the loop sequence comprises a nucleic acid sequence encoding at least one UGUG motif. In some embodiments, the nucleic acid sequence encoding the UGUG motif is located at the 5′ terminus of the loop sequence.

[0089] In one embodiment, spacer regions may be present in the modulatory polynucleotide to separate one or more modules (e.g., 5′ flanking region, loop motif region, 3′ flanking region, sense sequences, antisense sequence) from one another. There may be one or more such spacer regions present.

[0090] In one embodiment a spacer region of between 8-20, i.e., 8, 9, 10, 11, 12, 13, 14, 15, 16, 17, 18, 19, or 20 nucleotides may be present between the passenger strand and a flanking region sequence.

[0091] In one embodiment, the length of the spacer region is 13 nucleotides and is located between the 5′ terminus of the passenger strand and the 3′ terminus of the flanking sequence. In one embodiment a spacer is of sufficient length to form approximately one helical turn of the sequence.

[0092] In one embodiment a spacer region of between 8-20, i.e., 8, 9, 10, 11, 12, 13, 14, 15, 16, 17, 18, 19, or 20 nucleotides may be present between the guide strand and a flanking sequence.

[0093] In one embodiment, the spacer sequence is between 10-13, i.e., 10, 11, 12 or 13 nucleotides and is located between the 3′ terminus of the guide strand and the 5′ terminus of a flanking sequence. In one embodiment a spacer is of sufficient length to form approximately one helical turn of the sequence.

[0094] In one embodiment the modulatory polynucleotide comprises at least one UG motif at the base of the stem whereby the G nucleotide is paired and the U nucleotide is unpaired. In some embodiments the unpaired U nucleotide is located in a flanking sequence.

[0095] In one embodiment, the modulatory polynucleotide comprises in the 5′ to 3′ direction, a 5′ flanking sequence, a 5′ arm, a loop motif, a 3′ arm and a 3′ flanking sequence. As a non-limiting example, the 5′ arm may comprise a passenger strand and the 3′ arm comprises the guide strand. In another non-limiting example, the 5′ arm comprises the guide strand and the 3′ arm comprises the passenger strand.

[0096] In one embodiment, the 5′ arm, payload (e.g., passenger and/or guide strand), loop motif and/or 3′ arm sequence may be altered (e.g., substituting 1 or more nucleotides, adding nucleotides and/or deleting nucleotides). The alteration may cause a beneficial change in the function of the construct (e.g., increase knock-down of the target sequence, reduce degradation of the construct, reduce off target effect, increase efficiency of the payload, and reduce degradation of the payload).

[0097] In one embodiment, the passenger strand sequence may be altered (e.g., substituting 1 or more nucleotides, adding nucleotides and/or deleting nucleotides). As a non-limiting example, the passenger strand sequence may comprise 1 or 2 substitutions within the last 4 nucleotides of the sequence (e.g., C substituted for a G). As another non-limiting example, the passenger strand sequence may comprise 1 or 2 substitutions within the 7-15 nucleotides from the 5′end of the sequence (e.g., U substituted for an A or C substituted for a G).

[0098] In one embodiment, the 3′ arm strand sequence may be altered (e.g., substituting 1 or more nucleotides, adding nucleotides and/or deleting nucleotides). As a non-limiting example, the sequence of the 3′ arm may comprise 1 or 2 substitutions within the first 4 nucleotides of the sequence (e.g., A substituted for a U).

[0099] In one embodiment, the molecular scaffold of the payload construct may comprise a 5′ flanking region, a loop motif and a 3′ flanking region. Between the 5′ flanking region and the loop motif may be a first payload region and between the loop motif and the 3′ flanking region may be a second payload region. The first and second payload regions may comprise siRNA, miRNA or other RNAi agents, fragments or variants described herein. The first and second payload regions may also comprise a sequence which is the same, different or complementary to each other. As a non-limiting example, the first payload region sequence may be a passenger strand of a siRNA construct and the second payload region sequence may be a guide strand of an siRNA construct. The passenger and guide sequences may be substantially complementary to each other. As another non-limiting example, the first payload region sequence may be a guide strand of a siRNA construct and the second payload region sequence may be a passenger strand of an siRNA construct. The passenger and guide sequences may be substantially complementary to each other.

[0100] In one embodiment, the molecular scaffold of the modulatory polynucleotides described herein may comprise a 5′ flanking region, a loop motif region and a 3′ flanking region. Non-limiting examples of the sequences for the 5′ flanking region, loop motif region and the 3′ flanking region which may be encoded by the modulatory polynucleotide described herein are shown in Tables 1-3.

TABLE 1
5′ Flanking Regions for Molecular Scaffold

| | | 5′ Flanking |
|---|---|---|
| 5′ Flanking | | Region SEQ |
| Region Name | 5′ Flanking Region Sequence | ID NO |
| 5F1 | UUUAUGCCUCAUCCUCUGAGUGCUGAAGGC | 1 |
| | UUGCUGUAGGCUGUAUGCUG | |
| 5F2 | GUGCUGGGCGGGGGGCGGCGGGCCCUCCCGC | 2 |
| | AGAACACCAUGCGCUCUUCGGAA | |
| 5F3 | GAAGCAAAGAAGGGGCAGAGGGAGCCCGUG | 3 |
| | AGCUGAGUGGGCCAGGGACUGGGAGAAGGA | |
| | GUGAGGAGGCAGGGCCGGCAUGCCUCUGCU | |
| | GCUGGCCAGA | |
| 5F4 | GUGCUGGGCGGGGGGCGGCGGGCCCUCCCGC | 4 |
| | AGAACACCAUGCGCUCUUCGGGA | |
| 5F5 | GUGCUGGGCGGGGGGCGGCGGGCCCUCCCGC | 5 |
| | AGAACACCAUGCGCUCCACGGAA | |
| 5F6 | GGGCCCUCCCGCAGAACACCAUGCGCUCCAC | 6 |
| | GGAA | |
| 5F7 | CUCCCGCAGAACACCAUGCGCUCCACGGAA | 7 |
| 5F8 | GUGCUGGGCGGGGGGCGGCGGGCCCUCCCGC | 8 |
| | AGAACACCAUGCGCUCCACGGAAG | |
| 5F9 | GUGCUGGGCGGGGGGCGGCGGGCCCUCCCGC | 9 |
| | AGAACACCAUGCGCUCCUCGGAA | |

TABLE 2
Loop Motif Regions for Molecular Scaffold

| | | Loop Motif |
|---|---|---|
| Loop Motif | Loop | Region SEQ |
| Region Name | Motif Region Sequence | ID NO |
| L1 | UGUGACCUGG | 10 |
| L2 | UGUGAUUUGG | 11 |
| L3 | UAUAAUUUGG | 12 |
| L4 | CCUGACCCAGU | 13 |
| L5 | GUCUGCACCUGUCACUAG | 14 |
| L6 | GUGACCCAAG | 15 |
| L7 | GUGGCCACUGAGAAG | 16 |
| L8 | GUGACCCAAU | 17 |
| L9 | GUGACCCAAC | 18 |
| L10 | GUGGCCACUGAGAAA | 19 |

TABLE 3
3′Flanking Regions for Molecular Scaffold

| | | 3′ Flanking |
|---|---|---|
| 3′ Flanking | | Region SEQ |
| Region Name | 3′ Flanking Region Sequence | ID NO |
| 3F1 | AGUGUAUGAUGCCUGUUACUAGCAUUCACA | 20 |
| | UGGAACAAAUUGCUGCCGUG | |
| 3F2 | CUGAGGAGCGCCUUGACAGCAGCCAUGGGA | 21 |
| | GGGCCGCCCCCUACCUCAGUGA | |
| 3F3 | CUGUGGAGCGCCUUGACAGCAGCCAUGGGA | 22 |
| | GGGCCGCCCCCUACCUCAGUGA | |
| 3F4 | UGGCCGUGUAGUGCUACCCAGCGCUGGCUGC | 23 |
| | CUCCUCAGCAUUGCAAUUCCUCUCCCAUCUG | |
| | GGCACCAGUCAGCUACCCUGGUGGGAAUCU | |
| | GGGUAGCC | |
| 3F5 | GGCCGUGUAGUGCUACCCAGCGCUGGCUGCC | 24 |
| | UCCUCAGCAUUGCAAUUCCUCUCCCAUCUGG | |
| | GCACCAGUCAGCUACCCUGGUGGGAAUCUG | |
| | GGUAGCC | |
| 3F6 | UCCUGAGGAGCGCCUUGACAGCAGCCAUGG | 25 |
| | GAGGGCCGCCCCCUACCUCAGUGA | |
| 3F7 | CUGAGGAGCGCCUUGACAGCAGCCAUGGGA | 26 |
| | GGGCC | |
| 3F8 | CUGCGGAGCGCCUUGACAGCAGCCAUGGGA | 27 |
| | GGGCCGCCCCCUACCUCAGUGA | |

[0101] Any of the regions described in Tables 1-3, where U is T, may be used as modules in the molecular scaffolds described herein.

[0102] In one embodiment, the molecular scaffold may comprise at least one nucleic acid sequence encoding at least one 5′ flanking region listed in Table 1. As a non-limiting example, the 5′ flanking region may be 5F1, 5F2, 5F3, 5F4, 5F5, 5F6, 5F7, 5F8 or 5F9.

[0103] In one embodiment, the molecular scaffold may comprise at least one nucleic acid sequence encoding at least one 5F1 flanking region.

[0104] In one embodiment, the molecular scaffold may comprise at least one nucleic acid sequence encoding at least one 5F2 flanking region.

[0105] In one embodiment, the molecular scaffold may comprise at least one nucleic acid sequence encoding at least one 5F3 flanking region.

[0106] In one embodiment, the molecular scaffold may comprise at least one nucleic acid sequence encoding at least one 5F4 flanking region.

[0107] In one embodiment, the molecular scaffold may comprise at least one nucleic acid sequence encoding at least one 5F5 flanking region.

[0108] In one embodiment, the molecular scaffold may comprise at least one nucleic acid sequence encoding at least one 5F6 flanking region.

[0109] In one embodiment, the molecular scaffold may comprise at least one nucleic acid sequence encoding at least one 5F7 flanking region.

[0110] In one embodiment, the molecular scaffold may comprise at least one nucleic acid sequence encoding at least one 5F8 flanking region.

[0111] In one embodiment, the molecular scaffold may comprise at least one nucleic acid sequence encoding at least one 5F9 flanking region.

[0112] In one embodiment, the molecular scaffold may comprise at least one nucleic acid sequence encoding at least one one loop motif region listed in Table 2. As a non-limiting example, the loop motif region may be L1, L2, L3, L4, L5, L6, L7, L8, L9, or L10.

[0113] In one embodiment, the molecular scaffold may comprise at least one nucleic acid sequence encoding at least one L1 loop motif region.

[0114] In one embodiment, the molecular scaffold may comprise at least one nucleic acid sequence encoding at least one L2 loop motif region.

[0115] In one embodiment, the molecular scaffold may comprise at least one nucleic acid sequence encoding at least one L3 loop motif region.

[0116] In one embodiment, the molecular scaffold may comprise at least one nucleic acid sequence encoding at least one L4 loop motif region.

[0117] In one embodiment, the molecular scaffold may comprise at least one nucleic acid sequence encoding at least one L5 loop motif region.

[0118] In one embodiment, the molecular scaffold may comprise at least one nucleic acid sequence encoding at least one L6 loop motif region.

[0119] In one embodiment, the molecular scaffold may comprise at least one nucleic acid sequence encoding at least one L7 loop motif region.

[0120] In one embodiment, the molecular scaffold may comprise at least one nucleic acid sequence encoding at least one L8 loop motif region.

[0121] In one embodiment, the molecular scaffold may comprise at least one nucleic acid sequence encoding at least one L9 loop motif region.

[0122] In one embodiment, the molecular scaffold may comprise at least one nucleic acid sequence encoding at least one L10 loop motif region.

[0123] In one embodiment, the molecular scaffold may comprise at least one nucleic acid sequence encoding at least one 3′ flanking region listed in Table 3. As a non-limiting example, the molecular scaffold may comprise the 3′ flanking region 3F1, 3F2, 3F3, 3F4, 3F5, 3F6, 3F7 or 3F8.

[0124] In one embodiment, the molecular scaffold may comprise at least one nucleic acid sequence encoding at least one 3F1 flanking region.

[0125] In one embodiment, the molecular scaffold may comprise at least one nucleic acid sequence encoding at least one 3F2 flanking region.

[0126] In one embodiment, the molecular scaffold may comprise at least one nucleic acid sequence encoding at least one 3F3 flanking region.

[0127] In one embodiment, the molecular scaffold may comprise at least one nucleic acid sequence encoding at least one 3F4 flanking region.

[0128] In one embodiment, the molecular scaffold may comprise at least one nucleic acid sequence encoding at least one 3F5 flanking region.

[0129] In one embodiment, the molecular scaffold may comprise at least one nucleic acid sequence encoding at least one 3F6 flanking region.

[0130] In one embodiment, the molecular scaffold may comprise at least one nucleic acid sequence encoding at least one 3F7 flanking region.

[0131] In one embodiment, the molecular scaffold may comprise at least one nucleic acid sequence encoding at least one 3F8 flanking region.

[0132] In one embodiment, the molecular scaffold may comprise at least one nucleic acid sequence encoding at least one 5′ flanking region and at least one loop motif region as described in Tables 1 and 2. As a non-limiting example, the 5′ flanking region and the loop motif region may be 5F1 and L1, 5F1 and L2, 5F1 and L3, 5F1 and L4, 5F1 and L5, 5F1 and L6, 5F1 and L7, 5F1 and L8, 5F1 and L9, 5F1 and L10, 5F1 and L11, 5F2 and L1, 5F2 and L2, 5F2 and L3, 5F2 and L4, 5F2 and L5, 5F2 and L6, 5F2 and L7, 5F2 and L8, 5F2 and L9, 5F2 and L10, 5F2 and L11, 5F3 and L1, 5F3 and L2, 5F3 and L3, 5F3 and L4, 5F3 and L5, 5F3 and L6, 5F3 and L7, 5F3 and L8, 5F3 and L9, 5F3 and L10, 5F3 and L11, 5F4 and L1, 5F4 and L2, 5F4 and L3, 5F4 and L4, 5F4 and L5, 5F4 and L6, 5F4 and L7, 5F4 and L8, 5F4 and L9, 5F4 and L10, 5F4 and L11, 5F5 and L1, 5F5 and L2, 5F5 and L3, 5F5 and L4, 5F5 and L5, 5F5 and L6, 5F5 and L7, 5F5 and L8, 5F5 and L9, 5F5 and L10, 5F5 and L11, 5F6 and L1, 5F6 and L2, 5F6 and L3, 5F6 and L4, 5F6 and L5, 5F6 and L6, 5F6 and L7, 5F6 and L8, 5F6 and L9, 5F6 and L10, 5F6 and L11, 5F7 and L1, 5F7 and L2, 5F7 and L3, 5F7 and L4, 5F7 and L5, 5F7 and L6, 5F7 and L7, 5F7 and L8, 5F7 and L9, 5F7 and L10, 5F7 and L11, 5F8 and L1, 5F8 and L2, 5F8 and L3, 5F8 and L4, 5F8 and L5, 5F8 and L6, 5F8 and L7, 5F8 and L8, 5F8 and L9, 5F8 and L10, 5F8 and L11, 5F9 and L1, 5F9 and L2, 5F9 and L3, 5F9 and L4, 5F9 and L5, 5F9 and L6, 5F9 and L7, 5F9 and L8, 5F9 and L9, 5F9 and L10, or 5F9 and L11.

[0133] In one embodiment, the molecular scaffold may comprise at least one 3′ flanking region and at least one loop motif region as described in Tables 2 and 3. As a non-limiting example, the molecular scaffold may comprise 3F1 and L1, 3F1 and L2, 3F1 and L3, 3F1 and L4, 3F1 and L5, 3F1 and L6, 3F1 and L7, 3F1 and L8, 3F1 and L9, 3F1 and L10, 3F1 and L11, 3F2 and L1, 3F2 and L2, 3F2 and L3, 3F2 and L4, 3F2 and L5, 3F2 and L6, 3F2 and L7, 3F2 and L8, 3F2 and L9, 3F2 and L10, 3F2 and L11, 3F3 and L1, 3F3 and L2, 3F3 and L3, 3F3 and L4, 3F3 and L5, 3F3 and L6, 3F3 and L7, 3F3 and L8, 3F3 and L9, 3F3 and L10, 3F3 and L11, 3F4 and L1, 3F4 and L2, 3F4 and L3, 3F4 and L4, 3F4 and L5, 3F4 and L6, 3F4 and L7, 3F4 and L8, 3F4 and L9, 3F4 and L10, 3F4 and L11, 3F5 and L1, 3F5 and L2, 3F5 and L3, 3F5 and L4, 3F5 and L5, 3F5 and L6, 3F5 and L7, 3F5 and L8, 3F5 and L9, 3F5 and L10, 3F5 and L11, 3F6 and L1, 3F6 and L2, 3F6 and L3, 3F6 and L4, 3F6 and L5, 3F6 and L6, 3F6 and L7, 3F6 and L8, 3F6 and L9, 3F6 and L10, 3F6 and L11, 3F7 and L1, 3F7 and L2, 3F7 and L3, 3F7 and L4, 3F7 and L5, 3F7 and L6, 3F7 and L7, 3F7 and L8, 3F7 and L9, 3F7 and L10, 3F7 and L11, 3F8 and L1, 3F8 and L2, 3F8 and L3, 3F8 and L4, 3F8 and L5, 3F8 and L6, 3F8 and L7, 3F8 and L8, 3F8 and L9, 3F8 and L10, or 3F8 and L11.

[0134] In one embodiment, the molecular scaffold may comprise at least one nucleic acid sequence encoding at least one 5F1 flanking region and at least one nucleic acid sequence encoding at least one L1 loop motif region.

[0135] In one embodiment, the molecular scaffold may comprise at least one nucleic acid sequence encoding at least one 5F1 flanking region and at least one nucleic acid sequence encoding at least one L2 loop motif region.

[0136] In one embodiment, the molecular scaffold may comprise at least one nucleic acid sequence encoding at least one 5F1 flanking region and at least one nucleic acid sequence encoding at least one L3 loop motif region.

[0137] In one embodiment, the molecular scaffold may comprise at least one nucleic acid sequence encoding at least one 5F1 flanking region and at least one nucleic acid sequence encoding at least one L4 loop motif region.

[0138] In one embodiment, the molecular scaffold may comprise at least one nucleic acid sequence encoding at least one 5F1 flanking region and at least one nucleic acid sequence encoding at least one L5 loop motif region.

[0139] In one embodiment, the molecular scaffold may comprise at least one nucleic acid sequence encoding at least one 5F1 flanking region and at least one nucleic acid sequence encoding at least one L6 loop motif region.

[0140] In one embodiment, the molecular scaffold may comprise at least one nucleic acid sequence encoding at least one 5F1 flanking region and at least one nucleic acid sequence encoding at least one L7 loop motif region.

[0141] In one embodiment, the molecular scaffold may comprise at least one nucleic acid sequence encoding at least one 5F1 flanking region and at least one nucleic acid sequence encoding at least one L8 loop motif region.

[0142] In one embodiment, the molecular scaffold may comprise at least one nucleic acid sequence encoding at least one 5F1 flanking region and at least one nucleic acid sequence encoding at least one L9 loop motif region.

[0143] In one embodiment, the molecular scaffold may comprise at least one nucleic acid sequence encoding at least one 5F1 flanking region and at least one nucleic acid sequence encoding at least one L10 loop motif region.

[0144] In one embodiment, the molecular scaffold may comprise at least one nucleic acid sequence encoding at least one 5F1 flanking region and at least one nucleic acid sequence encoding at least one L11 loop motif region.

[0145] In one embodiment, the molecular scaffold may comprise at least one nucleic acid sequence encoding at least one 5F2 flanking region and at least one nucleic acid sequence encoding at least one L1 loop motif region.

[0146] In one embodiment, the molecular scaffold may comprise at least one nucleic acid sequence encoding at least one 5F2 flanking region and at least one nucleic acid sequence encoding at least one L2 loop motif region.

[0147] In one embodiment, the molecular scaffold may comprise at least one nucleic acid sequence encoding at least one 5F2 flanking region and at least one nucleic acid sequence encoding at least one L3 loop motif region.

[0148] In one embodiment, the molecular scaffold may comprise at least one nucleic acid sequence encoding at least one 5F2 flanking region and at least one nucleic acid sequence encoding at least one L4 loop motif region.

[0149] In one embodiment, the molecular scaffold may comprise at least one nucleic acid sequence encoding at least one 5F2 flanking region and at least one nucleic acid sequence encoding at least one L5 loop motif region.

[0150] In one embodiment, the molecular scaffold may comprise at least one nucleic acid sequence encoding at least one 5F2 flanking region and at least one nucleic acid sequence encoding at least one L6 loop motif region.

[0151] In one embodiment, the molecular scaffold may comprise at least one nucleic acid sequence encoding at least one 5F2 flanking region and at least one nucleic acid sequence encoding at least one L7 loop motif region.

[0152] In one embodiment, the molecular scaffold may comprise at least one nucleic acid sequence encoding at least one 5F2 flanking region and at least one nucleic acid sequence encoding at least one L8 loop motif region.

[0153] In one embodiment, the molecular scaffold may comprise at least one nucleic acid sequence encoding at least one 5F2 flanking region and at least one nucleic acid sequence encoding at least one L9 loop motif region.

[0154] In one embodiment, the molecular scaffold may comprise at least one nucleic acid sequence encoding at least one 5F2 flanking region and at least one nucleic acid sequence encoding at least one L10 loop motif region.

[0155] In one embodiment, the molecular scaffold may comprise at least one nucleic acid sequence encoding at least one 5F2 flanking region and at least one nucleic acid sequence encoding at least one L11 loop motif region.

[0156] In one embodiment, the molecular scaffold may comprise at least one nucleic acid sequence encoding at least one 5F3 flanking region and at least one nucleic acid sequence encoding at least one L1 loop motif region.

[0157] In one embodiment, the molecular scaffold may comprise at least one nucleic acid sequence encoding at least one 5F3 flanking region and at least one nucleic acid sequence encoding at least one L2 loop motif region.

[0158] In one embodiment, the molecular scaffold may comprise at least one nucleic acid sequence encoding at least one 5F3 flanking region and at least one nucleic acid sequence encoding at least one L3 loop motif region.

[0159] In one embodiment, the molecular scaffold may comprise at least one nucleic acid sequence encoding at least one 5F3 flanking region and at least one nucleic acid sequence encoding at least one L4 loop motif region.

[0160] In one embodiment, the molecular scaffold may comprise at least one nucleic acid sequence encoding at least one 5F3 flanking region and at least one nucleic acid sequence encoding at least one L5 loop motif region.

[0161] In one embodiment, the molecular scaffold may comprise at least one nucleic acid sequence encoding at least one 5F3 flanking region and at least one nucleic acid sequence encoding at least one L6 loop motif region.

[0162] In one embodiment, the molecular scaffold may comprise at least one nucleic acid sequence encoding at least one 5F3 flanking region and at least one nucleic acid sequence encoding at least one L7 loop motif region.

[0163] In one embodiment, the molecular scaffold may comprise at least one nucleic acid sequence encoding at least one 5F3 flanking region and at least one nucleic acid sequence encoding at least one L8 loop motif region.

[0164] In one embodiment, the molecular scaffold may comprise at least one nucleic acid sequence encoding at least one 5F3 flanking region and at least one nucleic acid sequence encoding at least one L9 loop motif region.

[0165] In one embodiment, the molecular scaffold may comprise at least one nucleic acid sequence encoding at least one 5F3 flanking region and at least one nucleic acid sequence encoding at least one L10 loop motif region.

[0166] In one embodiment, the molecular scaffold may comprise at least one nucleic acid sequence encoding at least one 5F3 flanking region and at least one nucleic acid sequence encoding at least one L11 loop motif region.

[0167] In one embodiment, the molecular scaffold may comprise at least one nucleic acid sequence encoding at least one 5F4 flanking region and at least one nucleic acid sequence encoding at least one L1 loop motif region.

[0168] In one embodiment, the molecular scaffold may comprise at least one nucleic acid sequence encoding at least one 5F4 flanking region and at least one nucleic acid sequence encoding at least one L2 loop motif region.

[0169] In one embodiment, the molecular scaffold may comprise at least one nucleic acid sequence encoding at least one 5F4 flanking region and at least one nucleic acid sequence encoding at least one L3 loop motif region.

[0170] In one embodiment, the molecular scaffold may comprise at least one nucleic acid sequence encoding at least one 5F4 flanking region and at least one nucleic acid sequence encoding at least one L4 loop motif region.

[0171] In one embodiment, the molecular scaffold may comprise at least one nucleic acid sequence encoding at least one 5F4 flanking region and at least one nucleic acid sequence encoding at least one L5 loop motif region.

[0172] In one embodiment, the molecular scaffold may comprise at least one nucleic acid sequence encoding at least one 5F4 flanking region and at least one nucleic acid sequence encoding at least one L6 loop motif region.

[0173] In one embodiment, the molecular scaffold may comprise at least one nucleic acid sequence encoding at least one 5F4 flanking region and at least one nucleic acid sequence encoding at least one L7 loop motif region.

[0174] In one embodiment, the molecular scaffold may comprise at least one nucleic acid sequence encoding at least one 5F4 flanking region and at least one nucleic acid sequence encoding at least one L8 loop motif region.

[0175] In one embodiment, the molecular scaffold may comprise at least one nucleic acid sequence encoding at least one 5F4 flanking region and at least one nucleic acid sequence encoding at least one L9 loop motif region.

[0176] In one embodiment, the molecular scaffold may comprise at least one nucleic acid sequence encoding at least one 5F4 flanking region and at least one nucleic acid sequence encoding at least one L10 loop motif region.

[0177] In one embodiment, the molecular scaffold may comprise at least one nucleic acid sequence encoding at least one 5F4 flanking region and at least one nucleic acid sequence encoding at least one L11 loop motif region.

[0178] In one embodiment, the molecular scaffold may comprise at least one nucleic acid sequence encoding at least one 5F5 flanking region and at least one nucleic acid sequence encoding at least one L1 loop motif region.

[0179] In one embodiment, the molecular scaffold may comprise at least one nucleic acid sequence encoding at least one 5F5 flanking region and at least one nucleic acid sequence encoding at least one L2 loop motif region.

[0180] In one embodiment, the molecular scaffold may comprise at least one nucleic acid sequence encoding at least one 5F5 flanking region and at least one nucleic acid sequence encoding at least one L3 loop motif region.

[0181] In one embodiment, the molecular scaffold may comprise at least one nucleic acid sequence encoding at least one 5F5 flanking region and at least one nucleic acid sequence encoding at least one L4 loop motif region.

[0182] In one embodiment, the molecular scaffold may comprise at least one nucleic acid sequence encoding at least one 5F5 flanking region and at least one nucleic acid sequence encoding at least one L5 loop motif region.

[0183] In one embodiment, the molecular scaffold may comprise at least one nucleic acid sequence encoding at least one 5F5 flanking region and at least one nucleic acid sequence encoding at least one L6 loop motif region.

[0184] In one embodiment, the molecular scaffold may comprise at least one nucleic acid sequence encoding at least one 5F5 flanking region and at least one nucleic acid sequence encoding at least one L7 loop motif region.

[0185] In one embodiment, the molecular scaffold may comprise at least one nucleic acid sequence encoding at least one 5F5 flanking region and at least one nucleic acid sequence encoding at least one L8 loop motif region.

[0186] In one embodiment, the molecular scaffold may comprise at least one nucleic acid sequence encoding at least one 5F5 flanking region and at least one nucleic acid sequence encoding at least one L9 loop motif region.

[0187] In one embodiment, the molecular scaffold may comprise at least one nucleic acid sequence encoding at least one 5F5 flanking region and at least one nucleic acid sequence encoding at least one L10 loop motif region.

[0188] In one embodiment, the molecular scaffold may comprise at least one nucleic acid sequence encoding at least one 5F5 flanking region and at least one nucleic acid sequence encoding at least one L11 loop motif region.

[0189] In one embodiment, the molecular scaffold may comprise at least one nucleic acid sequence encoding at least one 5F6 flanking region and at least one nucleic acid sequence encoding at least one L1 loop motif region.

[0190] In one embodiment, the molecular scaffold may comprise at least one nucleic acid sequence encoding at least one 5F6 flanking region and at least one nucleic acid sequence encoding at least one L2 loop motif region.

[0191] In one embodiment, the molecular scaffold may comprise at least one nucleic acid sequence encoding at least one 5F6 flanking region and at least one nucleic acid sequence encoding at least one L3 loop motif region.

[0192] In one embodiment, the molecular scaffold may comprise at least one nucleic acid sequence encoding at least one 5F6 flanking region and at least one nucleic acid sequence encoding at least one L4 loop motif region.

[0193] In one embodiment, the molecular scaffold may comprise at least one nucleic acid sequence encoding at least one 5F6 flanking region and at least one nucleic acid sequence encoding at least one L5 loop motif region.

[0194] In one embodiment, the molecular scaffold may comprise at least one nucleic acid sequence encoding at least one 5F6 flanking region and at least one nucleic acid sequence encoding at least one L6 loop motif region.

[0195] In one embodiment, the molecular scaffold may comprise at least one nucleic acid sequence encoding at least one 5F6 flanking region and at least one nucleic acid sequence encoding at least one L7 loop motif region.

[0196] In one embodiment, the molecular scaffold may comprise at least one nucleic acid sequence encoding at least one 5F6 flanking region and at least one nucleic acid sequence encoding at least one L8 loop motif region.

[0197] In one embodiment, the molecular scaffold may comprise at least one nucleic acid sequence encoding at least one 5F6 flanking region and at least one nucleic acid sequence encoding at least one L9 loop motif region.

[0198] In one embodiment, the molecular scaffold may comprise at least one nucleic acid sequence encoding at least one 5F6 flanking region and at least one nucleic acid sequence encoding at least one L10 loop motif region.

[0199] In one embodiment, the molecular scaffold may comprise at least one nucleic acid sequence encoding at least one 5F6 flanking region and at least one nucleic acid sequence encoding at least one L11 loop motif region.

[0200] In one embodiment, the molecular scaffold may comprise at least one nucleic acid sequence encoding at least one 5F7 flanking region and at least one nucleic acid sequence encoding at least one L1 loop motif region.

[0201] In one embodiment, the molecular scaffold may comprise at least one nucleic acid sequence encoding at least one 5F7 flanking region and at least one nucleic acid sequence encoding at least one L2 loop motif region.

[0202] In one embodiment, the molecular scaffold may comprise at least one nucleic acid sequence encoding at least one 5F7 flanking region and at least one nucleic acid sequence encoding at least one L3 loop motif region.

[0203] In one embodiment, the molecular scaffold may comprise at least one nucleic acid sequence encoding at least one 5F7 flanking region and at least one nucleic acid sequence encoding at least one L4 loop motif region.

[0204] In one embodiment, the molecular scaffold may comprise at least one nucleic acid sequence encoding at least one 5F7 flanking region and at least one nucleic acid sequence encoding at least one L5 loop motif region.

[0205] In one embodiment, the molecular scaffold may comprise at least one nucleic acid sequence encoding at least one 5F7 flanking region and at least one nucleic acid sequence encoding at least one L6 loop motif region.

[0206] In one embodiment, the molecular scaffold may comprise at least one nucleic acid sequence encoding at least one 5F7 flanking region and at least one nucleic acid sequence encoding at least one L7 loop motif region.

[0207] In one embodiment, the molecular scaffold may comprise at least one nucleic acid sequence encoding at least one 5F7 flanking region and at least one nucleic acid sequence encoding at least one L8 loop motif region.

[0208] In one embodiment, the molecular scaffold may comprise at least one nucleic acid sequence encoding at least one 5F7 flanking region and at least one nucleic acid sequence encoding at least one L9 loop motif region.

[0209] In one embodiment, the molecular scaffold may comprise at least one nucleic acid sequence encoding at least one 5F7 flanking region and at least one nucleic acid sequence encoding at least one L10 loop motif region.

[0210] In one embodiment, the molecular scaffold may comprise at least one nucleic acid sequence encoding at least one 5F7 flanking region and at least one nucleic acid sequence encoding at least one L11 loop motif region.

[0211] In one embodiment, the molecular scaffold may comprise at least one nucleic acid sequence encoding at least one 5F8 flanking region and at least one nucleic acid sequence encoding at least one L1 loop motif region.

[0212] In one embodiment, the molecular scaffold may comprise at least one nucleic acid sequence encoding at least one 5F8 flanking region and at least one nucleic acid sequence encoding at least one L2 loop motif region.

[0213] In one embodiment, the molecular scaffold may comprise at least one nucleic acid sequence encoding at least one 5F8 flanking region and at least one nucleic acid sequence encoding at least one L3 loop motif region.

[0214] In one embodiment, the molecular scaffold may comprise at least one nucleic acid sequence encoding at least one 5F8 flanking region and at least one nucleic acid sequence encoding at least one L4 loop motif region.

[0215] In one embodiment, the molecular scaffold may comprise at least one nucleic acid sequence encoding at least one 5F8 flanking region and at least one nucleic acid sequence encoding at least one L5 loop motif region.

[0216] In one embodiment, the molecular scaffold may comprise at least one nucleic acid sequence encoding at least one 5F8 flanking region and at least one nucleic acid sequence encoding at least one L6 loop motif region.

[0217] In one embodiment, the molecular scaffold may comprise at least one nucleic acid sequence encoding at least one 5F8 flanking region and at least one nucleic acid sequence encoding at least one L7 loop motif region.

[0218] In one embodiment, the molecular scaffold may comprise at least one nucleic acid sequence encoding at least one 5F8 flanking region and at least one nucleic acid sequence encoding at least one L8 loop motif region.

[0219] In one embodiment, the molecular scaffold may comprise at least one nucleic acid sequence encoding at least one 5F8 flanking region and at least one nucleic acid sequence encoding at least one L9 loop motif region.

[0220] In one embodiment, the molecular scaffold may comprise at least one nucleic acid sequence encoding at least one 5F8 flanking region and at least one nucleic acid sequence encoding at least one L10 loop motif region.

[0221] In one embodiment, the molecular scaffold may comprise at least one nucleic acid sequence encoding at least one 5F8 flanking region and at least one nucleic acid sequence encoding at least one L11 loop motif region.

[0222] In one embodiment, the molecular scaffold may comprise at least one nucleic acid sequence encoding at least one 5F9 flanking region and at least one nucleic acid sequence encoding at least one L1 loop motif region.

[0223] In one embodiment, the molecular scaffold may comprise at least one nucleic acid sequence encoding at least one 5F9 flanking region and at least one nucleic acid sequence encoding at least one L2 loop motif region.

[0224] In one embodiment, the molecular scaffold may comprise at least one nucleic acid sequence encoding at least one 5F9 flanking region and at least one nucleic acid sequence encoding at least one L3 loop motif region.

[0225] In one embodiment, the molecular scaffold may comprise at least one nucleic acid sequence encoding at least one 5F9 flanking region and at least one nucleic acid sequence encoding at least one L4 loop motif region.

[0226] In one embodiment, the molecular scaffold may comprise at least one nucleic acid sequence encoding at least one 5F9 flanking region and at least one nucleic acid sequence encoding at least one L5 loop motif region.

[0227] In one embodiment, the molecular scaffold may comprise at least one nucleic acid sequence encoding at least one 5F9 flanking region and at least one nucleic acid sequence encoding at least one L6 loop motif region.

[0228] In one embodiment, the molecular scaffold may comprise at least one nucleic acid sequence encoding at least one 5F9 flanking region and at least one nucleic acid sequence encoding at least one L7 loop motif region.

[0229] In one embodiment, the molecular scaffold may comprise at least one nucleic acid sequence encoding at least one 5F9 flanking region and at least one nucleic acid sequence encoding at least one L8 loop motif region.

[0230] In one embodiment, the molecular scaffold may comprise at least one nucleic acid sequence encoding at least one 5F9 flanking region and at least one nucleic acid sequence encoding at least one L9 loop motif region.

[0231] In one embodiment, the molecular scaffold may comprise at least one nucleic acid sequence encoding at least one 5F9 flanking region and at least one nucleic acid sequence encoding at least one L10 loop motif region.

[0232] In one embodiment, the molecular scaffold may comprise at least one nucleic acid sequence encoding at least one 5F9 flanking region and at least one nucleic acid sequence encoding at least one L11 loop motif region.

[0233] In one embodiment, the molecular scaffold may comprise at least one nucleic acid sequence encoding at least one 5′ flanking region and at least one nucleic acid sequence encoding at least 3′ flanking region as described in Tables 1 and 3. As a non-limiting example, the molecular scaffold may comprise 5F1 and 3F1, 5F1 and 3F2, 5F1 and 3F3, 5F1 and 3F4, 5F1 and 3F5, 5F1 and 3F6, 5F1 and 3F7, 5F1 and 3F8, 5F2 and 3F1, 5F2 and 3F2, 5F2 and 3F3, 5F2 and 3F4, 5F2 and 3F5, 5F2 and 3F6, 5F2 and 3F7, 5F2 and 3F8, 5F3 and 3F1, 5F3 and 3F2, 5F3 and 3F3, 5F3 and 3F4, 5F3 and 3F5, 5F3 and 3F6, 5F3 and 3F7, 5F3 and 3F8, 5F4 and 3F1, 5F4 and 3F2, 5F4 and 3F3, 5F4 and 3F4, 5F4 and 3F5, 5F4 and 3F6, 5F4 and 3F7, 5F4 and 3F8, 5F5 and 3F1, 5F5 and 3F2, 5F5 and 3F3, 5F5 and 3F4, 5F5 and 3F5, 5F5 and 3F6, 5F5 and 3F7, 5F5 and 3F8, 5F6 and 3F1, 5F6 and 3F2, 5F6 and 3F3, 5F6 and 3F4, 5F6 and 3F5, 5F6 and 3F6, 5F6 and 3F7, 5F6 and 3F8, 5F7 and 3F1, 5F7 and 3F2, 5F7 and 3F3, 5F7 and 3F4, 5F7 and 3F5, 5F7 and 3F6, 5F7 and 3F7, 5F7 and 3F8, 5F8 and 3F1, 5F8 and 3F2, 5F8 and 3F3, 5F8 and 3F4, 5F8 and 3F5, 5F8 and 3F6, 5F8 and 3F7, 5F8 and 3F8, 5F9 and 3F1, 5F9 and 3F2, 5F9 and 3F3, 5F9 and 3F4, 5F9 and 3F5, 5F9 and 3F6, 5F9 and 3F7, or 5F9 and 3F8.

[0234] In one embodiment, the molecular scaffold may comprise at least one nucleic acid sequence encoding at least one 5F1 5′ flanking region and at least one nucleic acid sequence encoding at least one 3F1 3′ flanking region.

[0235] In one embodiment, the molecular scaffold may comprise at least one nucleic acid sequence encoding at least one 5F1 5′ flanking region and at least one nucleic acid sequence encoding at least one 3F2 3′ flanking region.

[0236] In one embodiment, the molecular scaffold may comprise at least one nucleic acid sequence encoding at least one 5F1 5′ flanking region and at least one nucleic acid sequence encoding at least one 3F3 3′ flanking region.

[0237] In one embodiment, the molecular scaffold may comprise at least one nucleic acid sequence encoding at least one 5F1 5′ flanking region and at least one nucleic acid sequence encoding at least one 3F4 3′ flanking region.

[0238] In one embodiment, the molecular scaffold may comprise at least one nucleic acid sequence encoding at least one 5F1 5′ flanking region and at least one nucleic acid sequence encoding at least one 3F5 3′ flanking region.

[0239] In one embodiment, the molecular scaffold may comprise at least one nucleic acid sequence encoding at least one 5F1 5′ flanking region and at least one nucleic acid sequence encoding at least one 3F6 3′ flanking region.

[0240] In one embodiment, the molecular scaffold may comprise at least one nucleic acid sequence encoding at least one 5F1 5′ flanking region and at least one nucleic acid sequence encoding at least one 3F7 3′ flanking region.

[0241] In one embodiment, the molecular scaffold may comprise at least one nucleic acid sequence encoding at least one 5F1 5′ flanking region and at least one nucleic acid sequence encoding at least one 3F8 3′ flanking region.

[0242] In one embodiment, the molecular scaffold may comprise at least one nucleic acid sequence encoding at least one 5F2 5′ flanking region and at least one nucleic acid sequence encoding at least one 3F1 3′ flanking region.

[0243] In one embodiment, the molecular scaffold may comprise at least one nucleic acid sequence encoding at least one 5F2 5′ flanking region and at least one nucleic acid sequence encoding at least one 3F2 3′ flanking region.

[0244] In one embodiment, the molecular scaffold may comprise at least one nucleic acid sequence encoding at least one 5F2 5′ flanking region and at least one nucleic acid sequence encoding at least one 3F3 3′ flanking region.

[0245] In one embodiment, the molecular scaffold may comprise at least one nucleic acid sequence encoding at least one 5F2 5′ flanking region and at least one nucleic acid sequence encoding at least one 3F4 3′ flanking region.

[0246] In one embodiment, the molecular scaffold may comprise at least one nucleic acid sequence encoding at least one 5F2 5′ flanking region and at least one nucleic acid sequence encoding at least one 3F5 3′ flanking region.

[0247] In one embodiment, the molecular scaffold may comprise at least one nucleic acid sequence encoding at least one 5F2 5′ flanking region and at least one nucleic acid sequence encoding at least one 3F6 3′ flanking region.

[0248] In one embodiment, the molecular scaffold may comprise at least one nucleic acid sequence encoding at least one 5F2 5′ flanking region and at least one nucleic acid sequence encoding at least one 3F7 3′ flanking region.

[0249] In one embodiment, the molecular scaffold may comprise at least one nucleic acid sequence encoding at least one 5F2 5′ flanking region and at least one nucleic acid sequence encoding at least one 3F8 3′ flanking region.

[0250] In one embodiment, the molecular scaffold may comprise at least one nucleic acid sequence encoding at least one 5F3 5′ flanking region and at least one nucleic acid sequence encoding at least one 3F1 3′ flanking region.

[0251] In one embodiment, the molecular scaffold may comprise at least one nucleic acid sequence encoding at least one 5F3 5′ flanking region and at least one nucleic acid sequence encoding at least one 3F2 3′ flanking region.

[0252] In one embodiment, the molecular scaffold may comprise at least one nucleic acid sequence encoding at least one 5F3 5′ flanking region and at least one nucleic acid sequence encoding at least one 3F3 3′ flanking region.

[0253] In one embodiment, the molecular scaffold may comprise at least one nucleic acid sequence encoding at least one 5F3 5′ flanking region and at least one nucleic acid sequence encoding at least one 3F4 3′ flanking region.

[0254] In one embodiment, the molecular scaffold may comprise at least one nucleic acid sequence encoding at least one 5F3 5′ flanking region and at least one nucleic acid sequence encoding at least one 3F5 3′ flanking region.

[0255] In one embodiment, the molecular scaffold may comprise at least one nucleic acid sequence encoding at least one 5F3 5′ flanking region and at least one nucleic acid sequence encoding at least one 3F6 3′ flanking region.

[0256] In one embodiment, the molecular scaffold may comprise at least one nucleic acid sequence encoding at least one 5F3 5′ flanking region and at least one nucleic acid sequence encoding at least one 3F7 3′ flanking region.

[0257] In one embodiment, the molecular scaffold may comprise at least one nucleic acid sequence encoding at least one 5F3 5′ flanking region and at least one nucleic acid sequence encoding at least one 3F8 3′ flanking region.

[0258] In one embodiment, the molecular scaffold may comprise at least one nucleic acid sequence encoding at least one 5F4 5′ flanking region and at least one nucleic acid sequence encoding at least one 3F1 3′ flanking region.

[0259] In one embodiment, the molecular scaffold may comprise at least one nucleic acid sequence encoding at least one 5F4 5′ flanking region and at least one nucleic acid sequence encoding at least one 3F2 3′ flanking region.

[0260] In one embodiment, the molecular scaffold may comprise at least one nucleic acid sequence encoding at least one 5F4 5′ flanking region and at least one nucleic acid sequence encoding at least one 3F3 3′ flanking region.

[0261] In one embodiment, the molecular scaffold may comprise at least one nucleic acid sequence encoding at least one 5F4 5′ flanking region and at least one nucleic acid sequence encoding at least one 3F4 3′ flanking region.

[0262] In one embodiment, the molecular scaffold may comprise at least one nucleic acid sequence encoding at least one 5F4 5′ flanking region and at least one nucleic acid sequence encoding at least one 3F5 3′ flanking region.

[0263] In one embodiment, the molecular scaffold may comprise at least one nucleic acid sequence encoding at least one 5F4 5′ flanking region and at least one nucleic acid sequence encoding at least one 3F6 3′ flanking region.

[0264] In one embodiment, the molecular scaffold may comprise at least one nucleic acid sequence encoding at least one 5F4 5′ flanking region and at least one nucleic acid sequence encoding at least one 3F7 3′ flanking region.

[0265] In one embodiment, the molecular scaffold may comprise at least one nucleic acid sequence encoding at least one 5F4 5′ flanking region and at least one nucleic acid sequence encoding at least one 3F8 3′ flanking region.

[0266] In one embodiment, the molecular scaffold may comprise at least one nucleic acid sequence encoding at least one 5F5 5′ flanking region and at least one nucleic acid sequence encoding at least one 3F1 3′ flanking region.

[0267] In one embodiment, the molecular scaffold may comprise at least one nucleic acid sequence encoding at least one 5F5 5′ flanking region and at least one nucleic acid sequence encoding at least one 3F2 3′ flanking region.

[0268] In one embodiment, the molecular scaffold may comprise at least one nucleic acid sequence encoding at least one 5F5 5′ flanking region and at least one nucleic acid sequence encoding at least one 3F3 3′ flanking region.

[0269] In one embodiment, the molecular scaffold may comprise at least one nucleic acid sequence encoding at least one 5F5 5′ flanking region and at least one nucleic acid sequence encoding at least one 3F4 3′ flanking region.

[0270] In one embodiment, the molecular scaffold may comprise at least one nucleic acid sequence encoding at least one 5F5 5′ flanking region and at least one nucleic acid sequence encoding at least one 3F5 3′ flanking region.

[0271] In one embodiment, the molecular scaffold may comprise at least one nucleic acid sequence encoding at least one 5F5 5′ flanking region and at least one nucleic acid sequence encoding at least one 3F6 3′ flanking region.

[0272] In one embodiment, the molecular scaffold may comprise at least one nucleic acid sequence encoding at least one 5F5 5′ flanking region and at least one nucleic acid sequence encoding at least one 3F7 3′ flanking region.

[0273] In one embodiment, the molecular scaffold may comprise at least one nucleic acid sequence encoding at least one 5F5 5′ flanking region and at least one nucleic acid sequence encoding at least one 3F8 3′ flanking region.

[0274] In one embodiment, the molecular scaffold may comprise at least one nucleic acid sequence encoding at least one 5F6 5′ flanking region and at least one nucleic acid sequence encoding at least one 3F1 3′ flanking region.

[0275] In one embodiment, the molecular scaffold may comprise at least one nucleic acid sequence encoding at least one 5F6 5′ flanking region and at least one nucleic acid sequence encoding at least one 3F2 3′ flanking region.

[0276] In one embodiment, the molecular scaffold may comprise at least one nucleic acid sequence encoding at least one 5F6 5′ flanking region and at least one nucleic acid sequence encoding at least one 3F3 3′ flanking region.

[0277] In one embodiment, the molecular scaffold may comprise at least one nucleic acid sequence encoding at least one 5F6 5′ flanking region and at least one nucleic acid sequence encoding at least one 3F4 3′ flanking region.

[0278] In one embodiment, the molecular scaffold may comprise at least one nucleic acid sequence encoding at least one 5F6 5′ flanking region and at least one nucleic acid sequence encoding at least one 3F5 3′ flanking region.

[0279] In one embodiment, the molecular scaffold may comprise at least one nucleic acid sequence encoding at least one 5F6 5′ flanking region and at least one nucleic acid sequence encoding at least one 3F6 3′ flanking region.

[0280] In one embodiment, the molecular scaffold may comprise at least one nucleic acid sequence encoding at least one 5F6 5′ flanking region and at least one nucleic acid sequence encoding at least one 3F7 3′ flanking region.

[0281] In one embodiment, the molecular scaffold may comprise at least one nucleic acid sequence encoding at least one 5F6 5′ flanking region and at least one nucleic acid sequence encoding at least one 3F8 3′ flanking region.

[0282] In one embodiment, the molecular scaffold may comprise at least one nucleic acid sequence encoding at least one 5F7 5′ flanking region and at least one nucleic acid sequence encoding at least one 3F1 3′ flanking region.

[0283] In one embodiment, the molecular scaffold may comprise at least one nucleic acid sequence encoding at least one 5F7 5′ flanking region and at least one nucleic acid sequence encoding at least one 3F2 3′ flanking region.

[0284] In one embodiment, the molecular scaffold may comprise at least one nucleic acid sequence encoding at least one 5F7 5′ flanking region and at least one nucleic acid sequence encoding at least one 3F3 3′ flanking region.

[0285] In one embodiment, the molecular scaffold may comprise at least one nucleic acid sequence encoding at least one 5F7 5′ flanking region and at least one nucleic acid sequence encoding at least one 3F4 3′ flanking region.

[0286] In one embodiment, the molecular scaffold may comprise at least one nucleic acid sequence encoding at least one 5F7 5′ flanking region and at least one nucleic acid sequence encoding at least one 3F5 3′ flanking region.

[0287] In one embodiment, the molecular scaffold may comprise at least one nucleic acid sequence encoding at least one 5F7 5′ flanking region and at least one nucleic acid sequence encoding at least one 3F6 3′ flanking region.

[0288] In one embodiment, the molecular scaffold may comprise at least one nucleic acid sequence encoding at least one 5F7 5′ flanking region and at least one nucleic acid sequence encoding at least one 3F7 3′ flanking region.

[0289] In one embodiment, the molecular scaffold may comprise at least one nucleic acid sequence encoding at least one 5F7 5′ flanking region and at least one nucleic acid sequence encoding at least one 3F8 3′ flanking region.

[0290] In one embodiment, the molecular scaffold may comprise at least one nucleic acid sequence encoding at least one 5F8 5′ flanking region and at least one nucleic acid sequence encoding at least one 3F1 3′ flanking region.

[0291] In one embodiment, the molecular scaffold may comprise at least one nucleic acid sequence encoding at least one 5F8 5′ flanking region and at least one nucleic acid sequence encoding at least one 3F2 3′ flanking region.

[0292] In one embodiment, the molecular scaffold may comprise at least one nucleic acid sequence encoding at least one 5F8 5′ flanking region and at least one nucleic acid sequence encoding at least one 3F3 3′ flanking region.

[0293] In one embodiment, the molecular scaffold may comprise at least one nucleic acid sequence encoding at least one 5F8 5′ flanking region and at least one nucleic acid sequence encoding at least one 3F4 3′ flanking region.

[0294] In one embodiment, the molecular scaffold may comprise at least one nucleic acid sequence encoding at least one 5F8 5′ flanking region and at least one nucleic acid sequence encoding at least one 3F5 3′ flanking region.

[0295] In one embodiment, the molecular scaffold may comprise at least one nucleic acid sequence encoding at least one 5F8 5′ flanking region and at least one nucleic acid sequence encoding at least one 3F6 3′ flanking region.

[0296] In one embodiment, the molecular scaffold may comprise at least one nucleic acid sequence encoding at least one 5F8 5′ flanking region and at least one nucleic acid sequence encoding at least one 3F7 3′ flanking region.

[0297] In one embodiment, the molecular scaffold may comprise at least one nucleic acid sequence encoding at least one 5F8 5′ flanking region and at least one nucleic acid sequence encoding at least one 3F8 3′ flanking region.

[0298] In one embodiment, the molecular scaffold may comprise at least one nucleic acid sequence encoding at least one 5F9 5′ flanking region and at least one nucleic acid sequence encoding at least one 3F1 3′ flanking region.

[0299] In one embodiment, the molecular scaffold may comprise at least one nucleic acid sequence encoding at least one 5F9 5′ flanking region and at least one nucleic acid sequence encoding at least one 3F2 3′ flanking region.

[0300] In one embodiment, the molecular scaffold may comprise at least one nucleic acid sequence encoding at least one 5F9 5′ flanking region and at least one nucleic acid sequence encoding at least one 3F3 3′ flanking region.

[0301] In one embodiment, the molecular scaffold may comprise at least one nucleic acid sequence encoding at least one 5F9 5′ flanking region and at least one nucleic acid sequence encoding at least one 3F4 3′ flanking region.

[0302] In one embodiment, the molecular scaffold may comprise at least one nucleic acid sequence encoding at least one 5F9 5′ flanking region and at least one nucleic acid sequence encoding at least one 3F5 3′ flanking region.

[0303] In one embodiment, the molecular scaffold may comprise at least one nucleic acid sequence encoding at least one 5F9 5′ flanking region and at least one nucleic acid sequence encoding at least one 3F6 3′ flanking region.

[0304] In one embodiment, the molecular scaffold may comprise at least one nucleic acid sequence encoding at least one 5F9 5′ flanking region and at least one nucleic acid sequence encoding at least one 3F7 3′ flanking region.

[0305] In one embodiment, the molecular scaffold may comprise at least one nucleic acid sequence encoding at least one 5F9 5′ flanking region and at least one nucleic acid sequence encoding at least one 3F8 3′ flanking region.

[0306] In one embodiment, the molecular scaffold may comprise at least one 5′ flanking region, at least one loop motif region and at least one 3′ flanking region. As a non-limiting example, the molecular scaffold may comprise 5F1, L1 and 3F1; 5F1, L1 and 3F2; 5F1, L1 and 3F3; 5F1, L1 and 3F4; 5F1, L1 and 3F5; 5F1, L1 and 3F6; 5F1, L1 and 3F7; 5F1, L1 and 3F8; 5F2, L1 and 3F1; 5F2, L1 and 3F2; 5F2, L1 and 3F3; 5F2, L1 and 3F4; 5F2, L1 and 3F5; 5F2, L1 and 3F6; 5F2, L1 and 3F7; 5F2, L1 and 3F8; 5F3, L1 and 3F1; 5F3, L1 and 3F2; 5F3, L1 and 3F3; 5F3, L1 and 3F4; 5F3, L1 and 3F5; 5F3, L1 and 3F6; 5F3, L1 and 3F7; 5F3, L1 and 3F8; 5F4, L1 and 3F1; 5F4, L1 and 3F2; 5F4, L1 and 3F3; 5F4, L1 and 3F4; 5F4, L1 and 3F5; 5F4, L1 and 3F6; 5F4, L1 and 3F7; 5F4, L1 and 3F8; 5F5, L1 and 3F1; 5F5, L1 and 3F2; 5F5, L1 and 3F3; 5F5, L1 and 3F4; 5F5, L1 and 3F5; 5F5, L1 and 3F6; 5F5, L1 and 3F7; 5F5, L1 and 3F8; 5F6, L1 and 3F1; 5F6, L1 and 3F2; 5F6, L1 and 3F3; 5F6, L1 and 3F4; 5F6, L1 and 3F5; 5F6, L1 and 3F6; 5F6, L1 and 3F7; 5F6, L1 and 3F8; 5F7, L1 and 3F1; 5F7, L1 and 3F2; 5F7, L1 and 3F3; 5F7, L1 and 3F4; 5F7, L1 and 3F5; 5F7, L1 and 3F6; 5F7, L1 and 3F7; 5F7, L1 and 3F8; 5F8, L1 and 3F1; 5F8, L1 and 3F2; 5F8, L1 and 3F3; 5F8, L1 and 3F4; 5F8, L1 and 3F5; 5F8, L1 and 3F6; 5F8, L1 and 3F7; 5F8, L1 and 3F8; 5F9, L1 and 3F1; 5F9, L1 and 3F2; 5F9, L1 and 3F3; 5F9, L1 and 3F4; 5F9, L1 and 3F5; 5F9, L1 and 3F6; 5F9, L1 and 3F7; 5F9, L1 and 3F8; 5F1, L2 and 3F1; 5F1, L2 and 3F2; 5F1, L2 and 3F3; 5F1, L2 and 3F4; 5F1, L2 and 3F5; 5F1, L2 and 3F6; 5F1, L2 and 3F7; 5F1, L2 and 3F8; 5F2, L2 and 3F1; 5F2, L2 and 3F2; 5F2, L2 and 3F3; 5F2, L2 and 3F4; 5F2, L2 and 3F5; 5F2, L2 and 3F6; 5F2, L2 and 3F7; 5F2, L2 and 3F8; 5F3, L2 and 3F1; 5F3, L2 and 3F2; 5F3, L2 and 3F3; 5F3, L2 and 3F4; 5F3, L2 and 3F5; 5F3, L2 and 3F6; 5F3, L2 and 3F7; 5F3, L2 and 3F8; 5F4, L2 and 3F1; 5F4, L2 and 3F2; 5F4, L2 and 3F3; 5F4, L2 and 3F4; 5F4, L2 and 3F5; 5F4, L2 and 3F6; 5F4, L2 and 3F7; 5F4, L2 and 3F8; 5F5, L2 and 3F1; 5F5, L2 and 3F2; 5F5, L2 and 3F3; 5F5, L2 and 3F4; 5F5, L2 and 3F5; 5F5, L2 and 3F6; 5F5, L2 and 3F7; 5F5, L2 and 3F8; 5F6, L2 and 3F1; 5F6, L2 and 3F2; 5F6, L2 and 3F3; 5F6, L2 and 3F4; 5F6, L2 and 3F5; 5F6, L2 and 3F6; 5F6, L2 and 3F7; 5F6, L2 and 3F8; 5F7, L2 and 3F1; 5F7, L2 and 3F2; 5F7, L2 and 3F3; 5F7, L2 and 3F4; 5F7, L2 and 3F5; 5F7, L2 and 3F6; 5F7, L2 and 3F7; 5F7, L2 and 3F8; 5F8, L2 and 3F1; 5F8, L2 and 3F2; 5F8, L2 and 3F3; 5F8, L2 and 3F4; 5F8, L2 and 3F5; 5F8, L2 and 3F6; 5F8, L2 and 3F7; 5F8, L2 and 3F8; 5F9, L2 and 3F1; 5F9, L2 and 3F2; 5F9, L2 and 3F3; 5F9, L2 and 3F4; 5F9, L2 and 3F5; 5F9, L2 and 3F6; 5F9, L2 and 3F7; 5F9, L2 and 3F8; 5F1, L3 and 3F1; 5F1, L3 and 3F2; 5F1, L3 and 3F3; 5F1, L3 and 3F4; 5F1, L3 and 3F5; 5F1, L3 and 3F6; 5F1, L3 and 3F7; 5F1, L3 and 3F8; 5F2, L3 and 3F1; 5F2, L3 and 3F2; 5F2, L3 and 3F3; 5F2, L3 and 3F4; 5F2, L3 and 3F5; 5F2, L3 and 3F6; 5F2, L3 and 3F7; 5F2, L3 and 3F8; 5F3, L3 and 3F1; 5F3, L3 and 3F2; 5F3, L3 and 3F3; 5F3, L3 and 3F4; 5F3, L3 and 3F5; 5F3, L3 and 3F6; 5F3, L3 and 3F7; 5F3, L3 and 3F8; 5F4, L3 and 3F1; 5F4, L3 and 3F2; 5F4, L3 and 3F3; 5F4, L3 and 3F4; 5F4, L3 and 3F5; 5F4, L3 and 3F6; 5F4, L3 and 3F7; 5F4, L3 and 3F8; 5F5, L3 and 3F1; 5F5, L3 and 3F2; 5F5, L3 and 3F3; 5F5, L3 and 3F4; 5F5, L3 and 3F5; 5F5, L3 and 3F6; 5F5, L3 and 3F7; 5F5, L3 and 3F8; 5F6, L3 and 3F1; 5F6, L3 and 3F2; 5F6, L3 and 3F3; 5F6, L3 and 3F4; 5F6, L3 and 3F5; 5F6, L3 and 3F6; 5F6, L3 and 3F7; 5F6, L3 and 3F8; 5F7, L3 and 3F1; 5F7, L3 and 3F2; 5F7, L3 and 3F3; 5F7, L3 and 3F4; 5F7, L3 and 3F5; 5F7, L3 and 3F6; 5F7, L3 and 3F7; 5F7, L3 and 3F8; 5F8, L3 and 3F1; 5F8, L3 and 3F2; 5F8, L3 and 3F3; 5F8, L3 and 3F4; 5F8, L3 and 3F5; 5F8, L3 and 3F6; 5F8, L3 and 3F7; 5F8, L3 and 3F8; 5F9, L3 and 3F1; 5F9, L3 and 3F2; 5F9, L3 and 3F3; 5F9, L3 and 3F4; 5F9, L3 and 3F5; 5F9, L3 and 3F6; 5F9, L3 and 3F7; 5F9, L3 and 3F8; 5F1, L4 and 3F1; 5F1, L4 and 3F2; 5F1, L4 and 3F3; 5F1, L4 and 3F4; 5F1, L4 and 3F5; 5F1, L4 and 3F6; 5F1, L4 and 3F7; 5F1, L4 and 3F8; 5F2, L4 and 3F1; 5F2, L4 and 3F2; 5F2, L4 and 3F3; 5F2, L4 and 3F4; 5F2, L4 and 3F5; 5F2, L4 and 3F6; 5F2, L4 and 3F7; 5F2, L4 and 3F8; 5F3, L4 and 3F1; 5F3, L4 and 3F2; 5F3, L4 and 3F3; 5F3, L4 and 3F4; 5F3, L4 and 3F5; 5F3, L4 and 3F6; 5F3, L4 and 3F7; 5F3, L4 and 3F8; 5F4, L4 and 3F1; 5F4, L4 and 3F2; 5F4, L4 and 3F3; 5F4, L4 and 3F4; 5F4, L4 and 3F5; 5F4, L4 and 3F6; 5F4, L4 and 3F7; 5F4, L4 and 3F8; 5F5, L4 and 3F1; 5F5, L4 and 3F2; 5F5, L4 and 3F3; 5F5, L4 and 3F4; 5F5, L4 and 3F5; 5F5, L4 and 3F6; 5F5, L4 and 3F7; 5F5, L4 and 3F8; 5F6, L4 and 3F1; 5F6, L4 and 3F2; 5F6, L4 and 3F3; 5F6, L4 and 3F4; 5F6, L4 and 3F5; 5F6, L4 and 3F6; 5F6, L4 and 3F7; 5F6, L4 and 3F8; 5F7, L4 and 3F1; 5F7, L4 and 3F2; 5F7, L4 and 3F3; 5F7, L4 and 3F4; 5F7, L4 and 3F5; 5F7, L4 and 3F6; 5F7, L4 and 3F7; 5F7, L4 and 3F8; 5F8, L4 and 3F1; 5F8, L4 and 3F2; 5F8, L4 and 3F3; 5F8, L4 and 3F4; 5F8, L4 and 3F5; 5F8, L4 and 3F6; 5F8, L4 and 3F7; 5F8, L4 and 3F8; 5F9, L4 and 3F1; 5F9, L4 and 3F2; 5F9, L4 and 3F3; 5F9, L4 and 3F4; 5F9, L4 and 3F5; 5F9, L4 and 3F6; 5F9, L4 and 3F7; 5F9, L4 and 3F8; 5F1, L5 and 3F1; 5F1, L5 and 3F2; 5F1, L5 and 3F3; 5F1, L5 and 3F4; 5F1, L5 and 3F5; 5F1, L5 and 3F6; 5F1, L5 and 3F7; 5F1, L5 and 3F8; 5F2, L5 and 3F1; 5F2, L5 and 3F2; 5F2, L5 and 3F3; 5F2, L5 and 3F4; 5F2, L5 and 3F5; 5F2, L5 and 3F6; 5F2, L5 and 3F7; 5F2, L5 and 3F8; 5F3, L5 and 3F1; 5F3, L5 and 3F2; 5F3, L5 and 3F3; 5F3, L5 and 3F4; 5F3, L5 and 3F5; 5F3, L5 and 3F6; 5F3, L5 and 3F7; 5F3, L5 and 3F8; 5F4, L5 and 3F1; 5F4, L5 and 3F2; 5F4, L5 and 3F3; 5F4, L5 and 3F4; 5F4, L5 and 3F5; 5F4, L5 and 3F6; 5F4, L5 and 3F7; 5F4, L5 and 3F8; 5F5, L5 and 3F1; 5F5, L5 and 3F2; 5F5, L5 and 3F3; 5F5, L5 and 3F4; 5F5, L5 and 3F5; 5F5, L5 and 3F6; 5F5, L5 and 3F7; 5F5, L5 and 3F8; 5F6, L5 and 3F1; 5F6, L5 and 3F2; 5F6, L5 and 3F3; 5F6, L5 and 3F4; 5F6, L5 and 3F5; 5F6, L5 and 3F6; 5F6, L5 and 3F7; 5F6, L5 and 3F8; 5F7, L5 and 3F1; 5F7, L5 and 3F2; 5F7, L5 and 3F3; 5F7, L5 and 3F4; 5F7, L5 and 3F5; 5F7, L5 and 3F6; 5F7, L5 and 3F7; 5F7, L5 and 3F8; 5F8, L5 and 3F1; 5F8, L5 and 3F2; 5F8, L5 and 3F3; 5F8, L5 and 3F4; 5F8, L5 and 3F5; 5F8, L5 and 3F6; 5F8, L5 and 3F7; 5F8, L5 and 3F8; 5F9, L5 and 3F1; 5F9, L5 and 3F2; 5F9, L5 and 3F3; 5F9, L5 and 3F4; 5F9, L5 and 3F5; 5F9, L5 and 3F6; 5F9, L5 and 3F7; or 5F9, L5 and 3F8.

[0307] In one embodiment, the molecular scaffold may comprise at least one nucleic acid sequence encoding at least one 5F1 5′ flanking region, at least one nucleic acid sequence encoding at least one L1 loop motif region, and at least one nucleic acid sequence encoding at least one 3F1 3′ flanking region.

[0308] In one embodiment, the molecular scaffold may comprise at least one nucleic acid sequence encoding at least one 5F1 5′ flanking region, at least one nucleic acid sequence encoding at least one L1 loop motif region, and at least one nucleic acid sequence encoding at least one 3F2 3′ flanking region.

[0309] In one embodiment, the molecular scaffold may comprise at least one nucleic acid sequence encoding at least one 5F1 5′ flanking region, at least one nucleic acid sequence encoding at least one L1 loop motif region, and at least one nucleic acid sequence encoding at least one 3F3 3′ flanking region.

[0310] In one embodiment, the molecular scaffold may comprise at least one nucleic acid sequence encoding at least one 5F1 5′ flanking region, at least one nucleic acid sequence encoding at least one L1 loop motif region, and at least one nucleic acid sequence encoding at least one 3F4 3′ flanking region.

[0311] In one embodiment, the molecular scaffold may comprise at least one nucleic acid sequence encoding at least one 5F1 5′ flanking region, at least one nucleic acid sequence encoding at least one L1 loop motif region, and at least one nucleic acid sequence encoding at least one 3F5 3′ flanking region.

[0312] In one embodiment, the molecular scaffold may comprise at least one nucleic acid sequence encoding at least one 5F1 5′ flanking region, at least one nucleic acid sequence encoding at least one L1 loop motif region, and at least one nucleic acid sequence encoding at least one 3F6 3′ flanking region.

[0313] In one embodiment, the molecular scaffold may comprise at least one nucleic acid sequence encoding at least one 5F1 5′ flanking region, at least one nucleic acid sequence encoding at least one L1 loop motif region, and at least one nucleic acid sequence encoding at least one 3F7 3′ flanking region.

[0314] In one embodiment, the molecular scaffold may comprise at least one nucleic acid sequence encoding at least one 5F1 5′ flanking region, at least one nucleic acid sequence encoding at least one L1 loop motif region, and at least one nucleic acid sequence encoding at least one 3F8 3′ flanking region.

[0315] In one embodiment, the molecular scaffold may comprise at least one nucleic acid sequence encoding at least one 5F2 5′ flanking region, at least one nucleic acid sequence encoding at least one L1 loop motif region, and at least one nucleic acid sequence encoding at least one 3F1 3′ flanking region.

[0316] In one embodiment, the molecular scaffold may comprise at least one nucleic acid sequence encoding at least one 5F2 5′ flanking region, at least one nucleic acid sequence encoding at least one L1 loop motif region, and at least one nucleic acid sequence encoding at least one 3F2 3′ flanking region.

[0317] In one embodiment, the molecular scaffold may comprise at least one nucleic acid sequence encoding at least one 5F2 5′ flanking region, at least one nucleic acid sequence encoding at least one L1 loop motif region, and at least one nucleic acid sequence encoding at least one 3F3 3′ flanking region.

[0318] In one embodiment, the molecular scaffold may comprise at least one nucleic acid sequence encoding at least one 5F2 5′ flanking region, at least one nucleic acid sequence encoding at least one L1 loop motif region, and at least one nucleic acid sequence encoding at least one 3F4 3′ flanking region.

[0319] In one embodiment, the molecular scaffold may comprise at least one nucleic acid sequence encoding at least one 5F2 5′ flanking region, at least one nucleic acid sequence encoding at least one L1 loop motif region, and at least one nucleic acid sequence encoding at least one 3F5 3′ flanking region.

[0320] In one embodiment, the molecular scaffold may comprise at least one nucleic acid sequence encoding at least one 5F2 5′ flanking region, at least one nucleic acid sequence encoding at least one L1 loop motif region, and at least one nucleic acid sequence encoding at least one 3F6 3′ flanking region.

[0321] In one embodiment, the molecular scaffold may comprise at least one nucleic acid sequence encoding at least one 5F2 5′ flanking region, at least one nucleic acid sequence encoding at least one L1 loop motif region, and at least one nucleic acid sequence encoding at least one 3F7 3′ flanking region.

[0322] In one embodiment, the molecular scaffold may comprise at least one nucleic acid sequence encoding at least one 5F2 5′ flanking region, at least one nucleic acid sequence encoding at least one L1 loop motif region, and at least one nucleic acid sequence encoding at least one 3F8 3′ flanking region.

[0323] In one embodiment, the molecular scaffold may comprise at least one nucleic acid sequence encoding at least one 5F3 5′ flanking region, at least one nucleic acid sequence encoding at least one L1 loop motif region, and at least one nucleic acid sequence encoding at least one 3F1 3′ flanking region.

[0324] In one embodiment, the molecular scaffold may comprise at least one nucleic acid sequence encoding at least one 5F3 5′ flanking region, at least one nucleic acid sequence encoding at least one L1 loop motif region, and at least one nucleic acid sequence encoding at least one 3F2 3′ flanking region.

[0325] In one embodiment, the molecular scaffold may comprise at least one nucleic acid sequence encoding at least one 5F3 5′ flanking region, at least one nucleic acid sequence encoding at least one L1 loop motif region, and at least one nucleic acid sequence encoding at least one 3F3 3′ flanking region.

[0326] In one embodiment, the molecular scaffold may comprise at least one nucleic acid sequence encoding at least one 5F3 5′ flanking region, at least one nucleic acid sequence encoding at least one L1 loop motif region, and at least one nucleic acid sequence encoding at least one 3F4 3′ flanking region.

[0327] In one embodiment, the molecular scaffold may comprise at least one nucleic acid sequence encoding at least one 5F3 5′ flanking region, at least one nucleic acid sequence encoding at least one L1 loop motif region, and at least one nucleic acid sequence encoding at least one 3F5 3′ flanking region.

[0328] In one embodiment, the molecular scaffold may comprise at least one nucleic acid sequence encoding at least one 5F3 5′ flanking region, at least one nucleic acid sequence encoding at least one L1 loop motif region, and at least one nucleic acid sequence encoding at least one 3F6 3′ flanking region.

[0329] In one embodiment, the molecular scaffold may comprise at least one nucleic acid sequence encoding at least one 5F3 5′ flanking region, at least one nucleic acid sequence encoding at least one L1 loop motif region, and at least one nucleic acid sequence encoding at least one 3F7 3′ flanking region.

[0330] In one embodiment, the molecular scaffold may comprise at least one nucleic acid sequence encoding at least one 5F3 5′ flanking region, at least one nucleic acid sequence encoding at least one L1 loop motif region, and at least one nucleic acid sequence encoding at least one 3F8 3′ flanking region.

[0331] In one embodiment, the molecular scaffold may comprise at least one nucleic acid sequence encoding at least one 5F4 5′ flanking region, at least one nucleic acid sequence encoding at least one L1 loop motif region, and at least one nucleic acid sequence encoding at least one 3F1 3′ flanking region.

[0332] In one embodiment, the molecular scaffold may comprise at least one nucleic acid sequence encoding at least one 5F4 5′ flanking region, at least one nucleic acid sequence encoding at least one L1 loop motif region, and at least one nucleic acid sequence encoding at least one 3F2 3′ flanking region.

[0333] In one embodiment, the molecular scaffold may comprise at least one nucleic acid sequence encoding at least one 5F4 5′ flanking region, at least one nucleic acid sequence encoding at least one L1 loop motif region, and at least one nucleic acid sequence encoding at least one 3F3 3′ flanking region.

[0334] In one embodiment, the molecular scaffold may comprise at least one nucleic acid sequence encoding at least one 5F4 5′ flanking region, at least one nucleic acid sequence encoding at least one L1 loop motif region, and at least one nucleic acid sequence encoding at least one 3F4 3′ flanking region.

[0335] In one embodiment, the molecular scaffold may comprise at least one nucleic acid sequence encoding at least one 5F4 5′ flanking region, at least one nucleic acid sequence encoding at least one L1 loop motif region, and at least one nucleic acid sequence encoding at least one 3F5 3′ flanking region.

[0336] In one embodiment, the molecular scaffold may comprise at least one nucleic acid sequence encoding at least one 5F4 5′ flanking region, at least one nucleic acid sequence encoding at least one L1 loop motif region, and at least one nucleic acid sequence encoding at least one 3F6 3′ flanking region.

[0337] In one embodiment, the molecular scaffold may comprise at least one nucleic acid sequence encoding at least one 5F4 5′ flanking region, at least one nucleic acid sequence encoding at least one L1 loop motif region, and at least one nucleic acid sequence encoding at least one 3F7 3′ flanking region.

[0338] In one embodiment, the molecular scaffold may comprise at least one nucleic acid sequence encoding at least one 5F4 5′ flanking region, at least one nucleic acid sequence encoding at least one L1 loop motif region, and at least one nucleic acid sequence encoding at least one 3F8 3′ flanking region.

[0339] In one embodiment, the molecular scaffold may comprise at least one nucleic acid sequence encoding at least one 5F5 5′ flanking region, at least one nucleic acid sequence encoding at least one L1 loop motif region, and at least one nucleic acid sequence encoding at least one 3F1 3′ flanking region.

[0340] In one embodiment, the molecular scaffold may comprise at least one nucleic acid sequence encoding at least one 5F5 5′ flanking region, at least one nucleic acid sequence encoding at least one L1 loop motif region, and at least one nucleic acid sequence encoding at least one 3F2 3′ flanking region.

[0341] In one embodiment, the molecular scaffold may comprise at least one nucleic acid sequence encoding at least one 5F5 5′ flanking region, at least one nucleic acid sequence encoding at least one L1 loop motif region, and at least one nucleic acid sequence encoding at least one 3F3 3′ flanking region.

[0342] In one embodiment, the molecular scaffold may comprise at least one nucleic acid sequence encoding at least one 5F5 5′ flanking region, at least one nucleic acid sequence encoding at least one L1 loop motif region, and at least one nucleic acid sequence encoding at least one 3F4 3′ flanking region.

[0343] In one embodiment, the molecular scaffold may comprise at least one nucleic acid sequence encoding at least one 5F5 5′ flanking region, at least one nucleic acid sequence encoding at least one L1 loop motif region, and at least one nucleic acid sequence encoding at least one 3F5 3′ flanking region.

[0344] In one embodiment, the molecular scaffold may comprise at least one nucleic acid sequence encoding at least one 5F5 5′ flanking region, at least one nucleic acid sequence encoding at least one L1 loop motif region, and at least one nucleic acid sequence encoding at least one 3F6 3′ flanking region.

[0345] In one embodiment, the molecular scaffold may comprise at least one nucleic acid sequence encoding at least one 5F5 5′ flanking region, at least one nucleic acid sequence encoding at least one L1 loop motif region, and at least one nucleic acid sequence encoding at least one 3F7 3′ flanking region.

[0346] In one embodiment, the molecular scaffold may comprise at least one nucleic acid sequence encoding at least one 5F5 5′ flanking region, at least one nucleic acid sequence encoding at least one L1 loop motif region, and at least one nucleic acid sequence encoding at least one 3F8 3′ flanking region.

[0347] In one embodiment, the molecular scaffold may comprise at least one nucleic acid sequence encoding at least one 5F6 5′ flanking region, at least one nucleic acid sequence encoding at least one L1 loop motif region, and at least one nucleic acid sequence encoding at least one 3F1 3′ flanking region.

[0348] In one embodiment, the molecular scaffold may comprise at least one nucleic acid sequence encoding at least one 5F6 5′ flanking region, at least one nucleic acid sequence encoding at least one L1 loop motif region, and at least one nucleic acid sequence encoding at least one 3F2 3′ flanking region.

[0349] In one embodiment, the molecular scaffold may comprise at least one nucleic acid sequence encoding at least one 5F6 5′ flanking region, at least one nucleic acid sequence encoding at least one L1 loop motif region, and at least one nucleic acid sequence encoding at least one 3F3 3′ flanking region.

[0350] In one embodiment, the molecular scaffold may comprise at least one nucleic acid sequence encoding at least one 5F6 5′ flanking region, at least one nucleic acid sequence encoding at least one L1 loop motif region, and at least one nucleic acid sequence encoding at least one 3F4 3′ flanking region.

[0351] In one embodiment, the molecular scaffold may comprise at least one nucleic acid sequence encoding at least one 5F6 5′ flanking region, at least one nucleic acid sequence encoding at least one L1 loop motif region, and at least one nucleic acid sequence encoding at least one 3F5 3′ flanking region.

[0352] In one embodiment, the molecular scaffold may comprise at least one nucleic acid sequence encoding at least one 5F6 5′ flanking region, at least one nucleic acid sequence encoding at least one L1 loop motif region, and at least one nucleic acid sequence encoding at least one 3F6 3′ flanking region.

[0353] In one embodiment, the molecular scaffold may comprise at least one nucleic acid sequence encoding at least one 5F6 5′ flanking region, at least one nucleic acid sequence encoding at least one L1 loop motif region, and at least one nucleic acid sequence encoding at least one 3F7 3′ flanking region.

[0354] In one embodiment, the molecular scaffold may comprise at least one nucleic acid sequence encoding at least one 5F6 5′ flanking region, at least one nucleic acid sequence encoding at least one L1 loop motif region, and at least one nucleic acid sequence encoding at least one 3F8 3′ flanking region.

[0355] In one embodiment, the molecular scaffold may comprise at least one nucleic acid sequence encoding at least one 5F7 5′ flanking region, at least one nucleic acid sequence encoding at least one L1 loop motif region, and at least one nucleic acid sequence encoding at least one 3F1 3′ flanking region.

[0356] In one embodiment, the molecular scaffold may comprise at least one nucleic acid sequence encoding at least one 5F7 5′ flanking region, at least one nucleic acid sequence encoding at least one L1 loop motif region, and at least one nucleic acid sequence encoding at least one 3F2 3′ flanking region.

[0357] In one embodiment, the molecular scaffold may comprise at least one nucleic acid sequence encoding at least one 5F7 5′ flanking region, at least one nucleic acid sequence encoding at least one L1 loop motif region, and at least one nucleic acid sequence encoding at least one 3F3 3′ flanking region.

[0358] In one embodiment, the molecular scaffold may comprise at least one nucleic acid sequence encoding at least one 5F7 5′ flanking region, at least one nucleic acid sequence encoding at least one L1 loop motif region, and at least one nucleic acid sequence encoding at least one 3F4 3′ flanking region.

[0359] In one embodiment, the molecular scaffold may comprise at least one nucleic acid sequence encoding at least one 5F7 5′ flanking region, at least one nucleic acid sequence encoding at least one L1 loop motif region, and at least one nucleic acid sequence encoding at least one 3F5 3′ flanking region.

[0360] In one embodiment, the molecular scaffold may comprise at least one nucleic acid sequence encoding at least one 5F7 5′ flanking region, at least one nucleic acid sequence encoding at least one L1 loop motif region, and at least one nucleic acid sequence encoding at least one 3F6 3′ flanking region.

[0361] In one embodiment, the molecular scaffold may comprise at least one nucleic acid sequence encoding at least one 5F7 5′ flanking region, at least one nucleic acid sequence encoding at least one L1 loop motif region, and at least one nucleic acid sequence encoding at least one 3F7 3′ flanking region.

[0362] In one embodiment, the molecular scaffold may comprise at least one nucleic acid sequence encoding at least one 5F7 5′ flanking region, at least one nucleic acid sequence encoding at least one L1 loop motif region, and at least one nucleic acid sequence encoding at least one 3F8 3′ flanking region.

[0363] In one embodiment, the molecular scaffold may comprise at least one nucleic acid sequence encoding at least one 5F8 5′ flanking region, at least one nucleic acid sequence encoding at least one L1 loop motif region, and at least one nucleic acid sequence encoding at least one 3F1 3′ flanking region.

[0364] In one embodiment, the molecular scaffold may comprise at least one nucleic acid sequence encoding at least one 5F8 5′ flanking region, at least one nucleic acid sequence encoding at least one L1 loop motif region, and at least one nucleic acid sequence encoding at least one 3F2 3′ flanking region.

[0365] In one embodiment, the molecular scaffold may comprise at least one nucleic acid sequence encoding at least one 5F8 5′ flanking region, at least one nucleic acid sequence encoding at least one L1 loop motif region, and at least one nucleic acid sequence encoding at least one 3F3 3′ flanking region.

[0366] In one embodiment, the molecular scaffold may comprise at least one nucleic acid sequence encoding at least one 5F8 5′ flanking region, at least one nucleic acid sequence encoding at least one L1 loop motif region, and at least one nucleic acid sequence encoding at least one 3F4 3′ flanking region.

[0367] In one embodiment, the molecular scaffold may comprise at least one nucleic acid sequence encoding at least one 5F8 5′ flanking region, at least one nucleic acid sequence encoding at least one L1 loop motif region, and at least one nucleic acid sequence encoding at least one 3F5 3′ flanking region.

[0368] In one embodiment, the molecular scaffold may comprise at least one nucleic acid sequence encoding at least one 5F8 5′ flanking region, at least one nucleic acid sequence encoding at least one L1 loop motif region, and at least one nucleic acid sequence encoding at least one 3F6 3′ flanking region.

[0369] In one embodiment, the molecular scaffold may comprise at least one nucleic acid sequence encoding at least one 5F8 5′ flanking region, at least one nucleic acid sequence encoding at least one L1 loop motif region, and at least one nucleic acid sequence encoding at least one 3F7 3′ flanking region.

[0370] In one embodiment, the molecular scaffold may comprise at least one nucleic acid sequence encoding at least one 5F8 5′ flanking region, at least one nucleic acid sequence encoding at least one L1 loop motif region, and at least one nucleic acid sequence encoding at least one 3F8 3′ flanking region.

[0371] In one embodiment, the molecular scaffold may comprise at least one nucleic acid sequence encoding at least one 5F9 5′ flanking region, at least one nucleic acid sequence encoding at least one L1 loop motif region, and at least one nucleic acid sequence encoding at least one 3F1 3′ flanking region.

[0372] In one embodiment, the molecular scaffold may comprise at least one nucleic acid sequence encoding at least one 5F9 5′ flanking region, at least one nucleic acid sequence encoding at least one L1 loop motif region, and at least one nucleic acid sequence encoding at least one 3F2 3′ flanking region.

[0373] In one embodiment, the molecular scaffold may comprise at least one nucleic acid sequence encoding at least one 5F9 5′ flanking region, at least one nucleic acid sequence encoding at least one L1 loop motif region, and at least one nucleic acid sequence encoding at least one 3F3 3′ flanking region.

[0374] In one embodiment, the molecular scaffold may comprise at least one nucleic acid sequence encoding at least one 5F9 5′ flanking region, at least one nucleic acid sequence encoding at least one L1 loop motif region, and at least one nucleic acid sequence encoding at least one 3F4 3′ flanking region.

[0375] In one embodiment, the molecular scaffold may comprise at least one nucleic acid sequence encoding at least one 5F9 5′ flanking region, at least one nucleic acid sequence encoding at least one L1 loop motif region, and at least one nucleic acid sequence encoding at least one 3F5 3′ flanking region.

[0376] In one embodiment, the molecular scaffold may comprise at least one nucleic acid sequence encoding at least one 5F9 5′ flanking region, at least one nucleic acid sequence encoding at least one L1 loop motif region, and at least one nucleic acid sequence encoding at least one 3F6 3′ flanking region.

[0377] In one embodiment, the molecular scaffold may comprise at least one nucleic acid sequence encoding at least one 5F9 5′ flanking region, at least one nucleic acid sequence encoding at least one L1 loop motif region, and at least one nucleic acid sequence encoding at least one 3F7 3′ flanking region.

[0378] In one embodiment, the molecular scaffold may comprise at least one nucleic acid sequence encoding at least one 5F9 5′ flanking region, at least one nucleic acid sequence encoding at least one L1 loop motif region, and at least one nucleic acid sequence encoding at least one 3F8 3′ flanking region.

[0379] In one embodiment, the molecular scaffold may comprise at least one nucleic acid sequence encoding at least one 5F1 5′ flanking region, at least one nucleic acid sequence encoding at least one L2 loop motif region, and at least one nucleic acid sequence encoding at least one 3F1 3′ flanking region.

[0380] In one embodiment, the molecular scaffold may comprise at least one nucleic acid sequence encoding at least one 5F1 5′ flanking region, at least one nucleic acid sequence encoding at least one L2 loop motif region, and at least one nucleic acid sequence encoding at least one 3F2 3′ flanking region.

[0381] In one embodiment, the molecular scaffold may comprise at least one nucleic acid sequence encoding at least one 5F1 5′ flanking region, at least one nucleic acid sequence encoding at least one L2 loop motif region, and at least one nucleic acid sequence encoding at least one 3F3 3′ flanking region.

[0382] In one embodiment, the molecular scaffold may comprise at least one nucleic acid sequence encoding at least one 5F1 5′ flanking region, at least one nucleic acid sequence encoding at least one L2 loop motif region, and at least one nucleic acid sequence encoding at least one 3F4 3′ flanking region.

[0383] In one embodiment, the molecular scaffold may comprise at least one nucleic acid sequence encoding at least one 5F1 5′ flanking region, at least one nucleic acid sequence encoding at least one L2 loop motif region, and at least one nucleic acid sequence encoding at least one 3F5 3′ flanking region.

[0384] In one embodiment, the molecular scaffold may comprise at least one nucleic acid sequence encoding at least one 5F1 5′ flanking region, at least one nucleic acid sequence encoding at least one L2 loop motif region, and at least one nucleic acid sequence encoding at least one 3F6 3′ flanking region.

[0385] In one embodiment, the molecular scaffold may comprise at least one nucleic acid sequence encoding at least one 5F1 5′ flanking region, at least one nucleic acid sequence encoding at least one L2 loop motif region, and at least one nucleic acid sequence encoding at least one 3F7 3′ flanking region.

[0386] In one embodiment, the molecular scaffold may comprise at least one nucleic acid sequence encoding at least one 5F1 5′ flanking region, at least one nucleic acid sequence encoding at least one L2 loop motif region, and at least one nucleic acid sequence encoding at least one 3F8 3′ flanking region.

[0387] In one embodiment, the molecular scaffold may comprise at least one nucleic acid sequence encoding at least one 5F2 5′ flanking region, at least one nucleic acid sequence encoding at least one L2 loop motif region, and at least one nucleic acid sequence encoding at least one 3F1 3′ flanking region.

[0388] In one embodiment, the molecular scaffold may comprise at least one nucleic acid sequence encoding at least one 5F2 5′ flanking region, at least one nucleic acid sequence encoding at least one L2 loop motif region, and at least one nucleic acid sequence encoding at least one 3F2 3′ flanking region.

[0389] In one embodiment, the molecular scaffold may comprise at least one nucleic acid sequence encoding at least one 5F2 5′ flanking region, at least one nucleic acid sequence encoding at least one L2 loop motif region, and at least one nucleic acid sequence encoding at least one 3F3 3′ flanking region.

[0390] In one embodiment, the molecular scaffold may comprise at least one nucleic acid sequence encoding at least one 5F2 5′ flanking region, at least one nucleic acid sequence encoding at least one L2 loop motif region, and at least one nucleic acid sequence encoding at least one 3F4 3′ flanking region.

[0391] In one embodiment, the molecular scaffold may comprise at least one nucleic acid sequence encoding at least one 5F2 5′ flanking region, at least one nucleic acid sequence encoding at least one L2 loop motif region, and at least one nucleic acid sequence encoding at least one 3F5 3′ flanking region.

[0392] In one embodiment, the molecular scaffold may comprise at least one nucleic acid sequence encoding at least one 5F2 5′ flanking region, at least one nucleic acid sequence encoding at least one L2 loop motif region, and at least one nucleic acid sequence encoding at least one 3F6 3′ flanking region.

[0393] In one embodiment, the molecular scaffold may comprise at least one nucleic acid sequence encoding at least one 5F2 5′ flanking region, at least one nucleic acid sequence encoding at least one L2 loop motif region, and at least one nucleic acid sequence encoding at least one 3F7 3′ flanking region.

[0394] In one embodiment, the molecular scaffold may comprise at least one nucleic acid sequence encoding at least one 5F2 5′ flanking region, at least one nucleic acid sequence encoding at least one L2 loop motif region, and at least one nucleic acid sequence encoding at least one 3F8 3′ flanking region.

[0395] In one embodiment, the molecular scaffold may comprise at least one nucleic acid sequence encoding at least one 5F3 5′ flanking region, at least one nucleic acid sequence encoding at least one L2 loop motif region, and at least one nucleic acid sequence encoding at least one 3F1 3′ flanking region.

[0396] In one embodiment, the molecular scaffold may comprise at least one nucleic acid sequence encoding at least one 5F3 5′ flanking region, at least one nucleic acid sequence encoding at least one L2 loop motif region, and at least one nucleic acid sequence encoding at least one 3F2 3′ flanking region.

[0397] In one embodiment, the molecular scaffold may comprise at least one nucleic acid sequence encoding at least one 5F3 5′ flanking region, at least one nucleic acid sequence encoding at least one L2 loop motif region, and at least one nucleic acid sequence encoding at least one 3F3 3′ flanking region.

[0398] In one embodiment, the molecular scaffold may comprise at least one nucleic acid sequence encoding at least one 5F3 5′ flanking region, at least one nucleic acid sequence encoding at least one L2 loop motif region, and at least one nucleic acid sequence encoding at least one 3F4 3′ flanking region.

[0399] In one embodiment, the molecular scaffold may comprise at least one nucleic acid sequence encoding at least one 5F3 5′ flanking region, at least one nucleic acid sequence encoding at least one L2 loop motif region, and at least one nucleic acid sequence encoding at least one 3F5 3′ flanking region.

[0400] In one embodiment, the molecular scaffold may comprise at least one nucleic acid sequence encoding at least one 5F3 5′ flanking region, at least one nucleic acid sequence encoding at least one L2 loop motif region, and at least one nucleic acid sequence encoding at least one 3F6 3′ flanking region.

[0401] In one embodiment, the molecular scaffold may comprise at least one nucleic acid sequence encoding at least one 5F3 5′ flanking region, at least one nucleic acid sequence encoding at least one L2 loop motif region, and at least one nucleic acid sequence encoding at least one 3F7 3′ flanking region.

[0402] In one embodiment, the molecular scaffold may comprise at least one nucleic acid sequence encoding at least one 5F3 5′ flanking region, at least one nucleic acid sequence encoding at least one L2 loop motif region, and at least one nucleic acid sequence encoding at least one 3F8 3′ flanking region.

[0403] In one embodiment, the molecular scaffold may comprise at least one nucleic acid sequence encoding at least one 5F4 5′ flanking region, at least one nucleic acid sequence encoding at least one L2 loop motif region, and at least one nucleic acid sequence encoding at least one 3F1 3′ flanking region.

[0404] In one embodiment, the molecular scaffold may comprise at least one nucleic acid sequence encoding at least one 5F4 5′ flanking region, at least one nucleic acid sequence encoding at least one L2 loop motif region, and at least one nucleic acid sequence encoding at least one 3F2 3′ flanking region.

[0405] In one embodiment, the molecular scaffold may comprise at least one nucleic acid sequence encoding at least one 5F4 5′ flanking region, at least one nucleic acid sequence encoding at least one L2 loop motif region, and at least one nucleic acid sequence encoding at least one 3F3 3′ flanking region.

[0406] In one embodiment, the molecular scaffold may comprise at least one nucleic acid sequence encoding at least one 5F4 5′ flanking region, at least one nucleic acid sequence encoding at least one L2 loop motif region, and at least one nucleic acid sequence encoding at least one 3F4 3′ flanking region.

[0407] In one embodiment, the molecular scaffold may comprise at least one nucleic acid sequence encoding at least one 5F4 5′ flanking region, at least one nucleic acid sequence encoding at least one L2 loop motif region, and at least one nucleic acid sequence encoding at least one 3F5 3′ flanking region.

[0408] In one embodiment, the molecular scaffold may comprise at least one nucleic acid sequence encoding at least one 5F4 5′ flanking region, at least one nucleic acid sequence encoding at least one L2 loop motif region, and at least one nucleic acid sequence encoding at least one 3F6 3′ flanking region.

[0409] In one embodiment, the molecular scaffold may comprise at least one nucleic acid sequence encoding at least one 5F4 5′ flanking region, at least one nucleic acid sequence encoding at least one L2 loop motif region, and at least one nucleic acid sequence encoding at least one 3F7 3′ flanking region.

[0410] In one embodiment, the molecular scaffold may comprise at least one nucleic acid sequence encoding at least one 5F4 5′ flanking region, at least one nucleic acid sequence encoding at least one L2 loop motif region, and at least one nucleic acid sequence encoding at least one 3F8 3′ flanking region.

[0411] In one embodiment, the molecular scaffold may comprise at least one nucleic acid sequence encoding at least one 5F5 5′ flanking region, at least one nucleic acid sequence encoding at least one L2 loop motif region, and at least one nucleic acid sequence encoding at least one 3F1 3′ flanking region.

[0412] In one embodiment, the molecular scaffold may comprise at least one nucleic acid sequence encoding at least one 5F5 5′ flanking region, at least one nucleic acid sequence encoding at least one L2 loop motif region, and at least one nucleic acid sequence encoding at least one 3F2 3′ flanking region.

[0413] In one embodiment, the molecular scaffold may comprise at least one nucleic acid sequence encoding at least one 5F5 5′ flanking region, at least one nucleic acid sequence encoding at least one L2 loop motif region, and at least one nucleic acid sequence encoding at least one 3F3 3′ flanking region.

[0414] In one embodiment, the molecular scaffold may comprise at least one nucleic acid sequence encoding at least one 5F5 5′ flanking region, at least one nucleic acid sequence encoding at least one L2 loop motif region, and at least one nucleic acid sequence encoding at least one 3F4 3′ flanking region.

[0415] In one embodiment, the molecular scaffold may comprise at least one nucleic acid sequence encoding at least one 5F5 5′ flanking region, at least one nucleic acid sequence encoding at least one L2 loop motif region, and at least one nucleic acid sequence encoding at least one 3F5 3′ flanking region.

[0416] In one embodiment, the molecular scaffold may comprise at least one nucleic acid sequence encoding at least one 5F5 5′ flanking region, at least one nucleic acid sequence encoding at least one L2 loop motif region, and at least one nucleic acid sequence encoding at least one 3F6 3′ flanking region.

[0417] In one embodiment, the molecular scaffold may comprise at least one nucleic acid sequence encoding at least one 5F5 5′ flanking region, at least one nucleic acid sequence encoding at least one L2 loop motif region, and at least one nucleic acid sequence encoding at least one 3F7 3′ flanking region.

[0418] In one embodiment, the molecular scaffold may comprise at least one nucleic acid sequence encoding at least one 5F5 5′ flanking region, at least one nucleic acid sequence encoding at least one L2 loop motif region, and at least one nucleic acid sequence encoding at least one 3F8 3′ flanking region.

[0419] In one embodiment, the molecular scaffold may comprise at least one nucleic acid sequence encoding at least one 5F6 5′ flanking region, at least one nucleic acid sequence encoding at least one L2 loop motif region, and at least one nucleic acid sequence encoding at least one 3F1 3′ flanking region.

[0420] In one embodiment, the molecular scaffold may comprise at least one nucleic acid sequence encoding at least one 5F6 5′ flanking region, at least one nucleic acid sequence encoding at least one L2 loop motif region, and at least one nucleic acid sequence encoding at least one 3F2 3′ flanking region.

[0421] In one embodiment, the molecular scaffold may comprise at least one nucleic acid sequence encoding at least one 5F6 5′ flanking region, at least one nucleic acid sequence encoding at least one L2 loop motif region, and at least one nucleic acid sequence encoding at least one 3F3 3′ flanking region.

[0422] In one embodiment, the molecular scaffold may comprise at least one nucleic acid sequence encoding at least one 5F6 5′ flanking region, at least one nucleic acid sequence encoding at least one L2 loop motif region, and at least one nucleic acid sequence encoding at least one 3F4 3′ flanking region.

[0423] In one embodiment, the molecular scaffold may comprise at least one nucleic acid sequence encoding at least one 5F6 5′ flanking region, at least one nucleic acid sequence encoding at least one L2 loop motif region, and at least one nucleic acid sequence encoding at least one 3F5 3′ flanking region.

[0424] In one embodiment, the molecular scaffold may comprise at least one nucleic acid sequence encoding at least one 5F6 5′ flanking region, at least one nucleic acid sequence encoding at least one L2 loop motif region, and at least one nucleic acid sequence encoding at least one 3F6 3′ flanking region.

[0425] In one embodiment, the molecular scaffold may comprise at least one nucleic acid sequence encoding at least one 5F6 5′ flanking region, at least one nucleic acid sequence encoding at least one L2 loop motif region, and at least one nucleic acid sequence encoding at least one 3F7 3′ flanking region.

[0426] In one embodiment, the molecular scaffold may comprise at least one nucleic acid sequence encoding at least one 5F6 5′ flanking region, at least one nucleic acid sequence encoding at least one L2 loop motif region, and at least one nucleic acid sequence encoding at least one 3F8 3′ flanking region.

[0427] In one embodiment, the molecular scaffold may comprise at least one nucleic acid sequence encoding at least one 5F7 5′ flanking region, at least one nucleic acid sequence encoding at least one L2 loop motif region, and at least one nucleic acid sequence encoding at least one 3F1 3′ flanking region.

[0428] In one embodiment, the molecular scaffold may comprise at least one nucleic acid sequence encoding at least one 5F7 5′ flanking region, at least one nucleic acid sequence encoding at least one L2 loop motif region, and at least one nucleic acid sequence encoding at least one 3F2 3′ flanking region.

[0429] In one embodiment, the molecular scaffold may comprise at least one nucleic acid sequence encoding at least one 5F7 5′ flanking region, at least one nucleic acid sequence encoding at least one L2 loop motif region, and at least one nucleic acid sequence encoding at least one 3F3 3′ flanking region.

[0430] In one embodiment, the molecular scaffold may comprise at least one nucleic acid sequence encoding at least one 5F7 5′ flanking region, at least one nucleic acid sequence encoding at least one L2 loop motif region, and at least one nucleic acid sequence encoding at least one 3F4 3′ flanking region.

[0431] In one embodiment, the molecular scaffold may comprise at least one nucleic acid sequence encoding at least one 5F7 5′ flanking region, at least one nucleic acid sequence encoding at least one L2 loop motif region, and at least one nucleic acid sequence encoding at least one 3F5 3′ flanking region.

[0432] In one embodiment, the molecular scaffold may comprise at least one nucleic acid sequence encoding at least one 5F7 5′ flanking region, at least one nucleic acid sequence encoding at least one L2 loop motif region, and at least one nucleic acid sequence encoding at least one 3F6 3′ flanking region.

[0433] In one embodiment, the molecular scaffold may comprise at least one nucleic acid sequence encoding at least one 5F7 5′ flanking region, at least one nucleic acid sequence encoding at least one L2 loop motif region, and at least one nucleic acid sequence encoding at least one 3F7 3′ flanking region.

[0434] In one embodiment, the molecular scaffold may comprise at least one nucleic acid sequence encoding at least one 5F7 5′ flanking region, at least one nucleic acid sequence encoding at least one L2 loop motif region, and at least one nucleic acid sequence encoding at least one 3F8 3′ flanking region.

[0435] In one embodiment, the molecular scaffold may comprise at least one nucleic acid sequence encoding at least one 5F8 5′ flanking region, at least one nucleic acid sequence encoding at least one L2 loop motif region, and at least one nucleic acid sequence encoding at least one 3F1 3′ flanking region.

[0436] In one embodiment, the molecular scaffold may comprise at least one nucleic acid sequence encoding at least one 5F8 5′ flanking region, at least one nucleic acid sequence encoding at least one L2 loop motif region, and at least one nucleic acid sequence encoding at least one 3F2 3′ flanking region.

[0437] In one embodiment, the molecular scaffold may comprise at least one nucleic acid sequence encoding at least one 5F8 5′ flanking region, at least one nucleic acid sequence encoding at least one L2 loop motif region, and at least one nucleic acid sequence encoding at least one 3F3 3′ flanking region.

[0438] In one embodiment, the molecular scaffold may comprise at least one nucleic acid sequence encoding at least one 5F8 5′ flanking region, at least one nucleic acid sequence encoding at least one L2 loop motif region, and at least one nucleic acid sequence encoding at least one 3F4 3′ flanking region.

[0439] In one embodiment, the molecular scaffold may comprise at least one nucleic acid sequence encoding at least one 5F8 5′ flanking region, at least one nucleic acid sequence encoding at least one L2 loop motif region, and at least one nucleic acid sequence encoding at least one 3F5 3′ flanking region.

[0440] In one embodiment, the molecular scaffold may comprise at least one nucleic acid sequence encoding at least one 5F8 5′ flanking region, at least one nucleic acid sequence encoding at least one L2 loop motif region, and at least one nucleic acid sequence encoding at least one 3F6 3′ flanking region.

[0441] In one embodiment, the molecular scaffold may comprise at least one nucleic acid sequence encoding at least one 5F8 5′ flanking region, at least one nucleic acid sequence encoding at least one L2 loop motif region, and at least one nucleic acid sequence encoding at least one 3F7 3′ flanking region.

[0442] In one embodiment, the molecular scaffold may comprise at least one nucleic acid sequence encoding at least one 5F8 5′ flanking region, at least one nucleic acid sequence encoding at least one L2 loop motif region, and at least one nucleic acid sequence encoding at least one 3F8 3′ flanking region.

[0443] In one embodiment, the molecular scaffold may comprise at least one nucleic acid sequence encoding at least one 5F9 5′ flanking region, at least one nucleic acid sequence encoding at least one L2 loop motif region, and at least one nucleic acid sequence encoding at least one 3F1 3′ flanking region.

[0444] In one embodiment, the molecular scaffold may comprise at least one nucleic acid sequence encoding at least one 5F9 5′ flanking region, at least one nucleic acid sequence encoding at least one L2 loop motif region, and at least one nucleic acid sequence encoding at least one 3F2 3′ flanking region.

[0445] In one embodiment, the molecular scaffold may comprise at least one nucleic acid sequence encoding at least one 5F9 5′ flanking region, at least one nucleic acid sequence encoding at least one L2 loop motif region, and at least one nucleic acid sequence encoding at least one 3F3 3′ flanking region.

[0446] In one embodiment, the molecular scaffold may comprise at least one nucleic acid sequence encoding at least one 5F9 5′ flanking region, at least one nucleic acid sequence encoding at least one L2 loop motif region, and at least one nucleic acid sequence encoding at least one 3F4 3′ flanking region.

[0447] In one embodiment, the molecular scaffold may comprise at least one nucleic acid sequence encoding at least one 5F9 5′ flanking region, at least one nucleic acid sequence encoding at least one L2 loop motif region, and at least one nucleic acid sequence encoding at least one 3F5 3′ flanking region.

[0448] In one embodiment, the molecular scaffold may comprise at least one nucleic acid sequence encoding at least one 5F9 5′ flanking region, at least one nucleic acid sequence encoding at least one L2 loop motif region, and at least one nucleic acid sequence encoding at least one 3F6 3′ flanking region.

[0449] In one embodiment, the molecular scaffold may comprise at least one nucleic acid sequence encoding at least one 5F9 5′ flanking region, at least one nucleic acid sequence encoding at least one L2 loop motif region, and at least one nucleic acid sequence encoding at least one 3F7 3′ flanking region.

[0450] In one embodiment, the molecular scaffold may comprise at least one nucleic acid sequence encoding at least one 5F9 5′ flanking region, at least one nucleic acid sequence encoding at least one L2 loop motif region, and at least one nucleic acid sequence encoding at least one 3F8 3′ flanking region.

[0451] In one embodiment, the molecular scaffold may comprise at least one nucleic acid sequence encoding at least one 5F1 5′ flanking region, at least one nucleic acid sequence encoding at least one L3 loop motif region, and at least one nucleic acid sequence encoding at least one 3F1 3′ flanking region.

[0452] In one embodiment, the molecular scaffold may comprise at least one nucleic acid sequence encoding at least one 5F1 5′ flanking region, at least one nucleic acid sequence encoding at least one L3 loop motif region, and at least one nucleic acid sequence encoding at least one 3F2 3′ flanking region.

[0453] In one embodiment, the molecular scaffold may comprise at least one nucleic acid sequence encoding at least one 5F1 5′ flanking region, at least one nucleic acid sequence encoding at least one L3 loop motif region, and at least one nucleic acid sequence encoding at least one 3F3 3′ flanking region.

[0454] In one embodiment, the molecular scaffold may comprise at least one nucleic acid sequence encoding at least one 5F1 5′ flanking region, at least one nucleic acid sequence encoding at least one L3 loop motif region, and at least one nucleic acid sequence encoding at least one 3F4 3′ flanking region.

[0455] In one embodiment, the molecular scaffold may comprise at least one nucleic acid sequence encoding at least one 5F1 5′ flanking region, at least one nucleic acid sequence encoding at least one L3 loop motif region, and at least one nucleic acid sequence encoding at least one 3F5 3′ flanking region.

[0456] In one embodiment, the molecular scaffold may comprise at least one nucleic acid sequence encoding at least one 5F1 5′ flanking region, at least one nucleic acid sequence encoding at least one L3 loop motif region, and at least one nucleic acid sequence encoding at least one 3F6 3′ flanking region.

[0457] In one embodiment, the molecular scaffold may comprise at least one nucleic acid sequence encoding at least one 5F1 5′ flanking region, at least one nucleic acid sequence encoding at least one L3 loop motif region, and at least one nucleic acid sequence encoding at least one 3F7 3′ flanking region.

[0458] In one embodiment, the molecular scaffold may comprise at least one nucleic acid sequence encoding at least one 5F1 5′ flanking region, at least one nucleic acid sequence encoding at least one L3 loop motif region, and at least one nucleic acid sequence encoding at least one 3F8 3′ flanking region.

[0459] In one embodiment, the molecular scaffold may comprise at least one nucleic acid sequence encoding at least one 5F2 5′ flanking region, at least one nucleic acid sequence encoding at least one L3 loop motif region, and at least one nucleic acid sequence encoding at least one 3F1 3′ flanking region.

[0460] In one embodiment, the molecular scaffold may comprise at least one nucleic acid sequence encoding at least one 5F2 5′ flanking region, at least one nucleic acid sequence encoding at least one L3 loop motif region, and at least one nucleic acid sequence encoding at least one 3F2 3′ flanking region.

[0461] In one embodiment, the molecular scaffold may comprise at least one nucleic acid sequence encoding at least one 5F2 5′ flanking region, at least one nucleic acid sequence encoding at least one L3 loop motif region, and at least one nucleic acid sequence encoding at least one 3F3 3′ flanking region.

[0462] In one embodiment, the molecular scaffold may comprise at least one nucleic acid sequence encoding at least one 5F2 5′ flanking region, at least one nucleic acid sequence encoding at least one L3 loop motif region, and at least one nucleic acid sequence encoding at least one 3F4 3′ flanking region.

[0463] In one embodiment, the molecular scaffold may comprise at least one nucleic acid sequence encoding at least one 5F2 5′ flanking region, at least one nucleic acid sequence encoding at least one L3 loop motif region, and at least one nucleic acid sequence encoding at least one 3F5 3′ flanking region.

[0464] In one embodiment, the molecular scaffold may comprise at least one nucleic acid sequence encoding at least one 5F2 5′ flanking region, at least one nucleic acid sequence encoding at least one L3 loop motif region, and at least one nucleic acid sequence encoding at least one 3F6 3′ flanking region.

[0465] In one embodiment, the molecular scaffold may comprise at least one nucleic acid sequence encoding at least one 5F2 5′ flanking region, at least one nucleic acid sequence encoding at least one L3 loop motif region, and at least one nucleic acid sequence encoding at least one 3F7 3′ flanking region.

[0466] In one embodiment, the molecular scaffold may comprise at least one nucleic acid sequence encoding at least one 5F2 5′ flanking region, at least one nucleic acid sequence encoding at least one L3 loop motif region, and at least one nucleic acid sequence encoding at least one 3F8 3′ flanking region.

[0467] In one embodiment, the molecular scaffold may comprise at least one nucleic acid sequence encoding at least one 5F3 5′ flanking region, at least one nucleic acid sequence encoding at least one L3 loop motif region, and at least one nucleic acid sequence encoding at least one 3F1 3′ flanking region.

[0468] In one embodiment, the molecular scaffold may comprise at least one nucleic acid sequence encoding at least one 5F3 5′ flanking region, at least one nucleic acid sequence encoding at least one L3 loop motif region, and at least one nucleic acid sequence encoding at least one 3F2 3′ flanking region.

[0469] In one embodiment, the molecular scaffold may comprise at least one nucleic acid sequence encoding at least one 5F3 5′ flanking region, at least one nucleic acid sequence encoding at least one L3 loop motif region, and at least one nucleic acid sequence encoding at least one 3F3 3′ flanking region.

[0470] In one embodiment, the molecular scaffold may comprise at least one nucleic acid sequence encoding at least one 5F3 5′ flanking region, at least one nucleic acid sequence encoding at least one L3 loop motif region, and at least one nucleic acid sequence encoding at least one 3F4 3′ flanking region.

[0471] In one embodiment, the molecular scaffold may comprise at least one nucleic acid sequence encoding at least one 5F3 5′ flanking region, at least one nucleic acid sequence encoding at least one L3 loop motif region, and at least one nucleic acid sequence encoding at least one 3F5 3′ flanking region.

[0472] In one embodiment, the molecular scaffold may comprise at least one nucleic acid sequence encoding at least one 5F3 5′ flanking region, at least one nucleic acid sequence encoding at least one L3 loop motif region, and at least one nucleic acid sequence encoding at least one 3F6 3′ flanking region.

[0473] In one embodiment, the molecular scaffold may comprise at least one nucleic acid sequence encoding at least one 5F3 5′ flanking region, at least one nucleic acid sequence encoding at least one L3 loop motif region, and at least one nucleic acid sequence encoding at least one 3F7 3′ flanking region.

[0474] In one embodiment, the molecular scaffold may comprise at least one nucleic acid sequence encoding at least one 5F3 5′ flanking region, at least one nucleic acid sequence encoding at least one L3 loop motif region, and at least one nucleic acid sequence encoding at least one 3F8 3′ flanking region.

[0475] In one embodiment, the molecular scaffold may comprise at least one nucleic acid sequence encoding at least one 5F4 5′ flanking region, at least one nucleic acid sequence encoding at least one L3 loop motif region, and at least one nucleic acid sequence encoding at least one 3F1 3′ flanking region.

[0476] In one embodiment, the molecular scaffold may comprise at least one nucleic acid sequence encoding at least one 5F4 5′ flanking region, at least one nucleic acid sequence encoding at least one L3 loop motif region, and at least one nucleic acid sequence encoding at least one 3F2 3′ flanking region.

[0477] In one embodiment, the molecular scaffold may comprise at least one nucleic acid sequence encoding at least one 5F4 5′ flanking region, at least one nucleic acid sequence encoding at least one L3 loop motif region, and at least one nucleic acid sequence encoding at least one 3F3 3′ flanking region.

[0478] In one embodiment, the molecular scaffold may comprise at least one nucleic acid sequence encoding at least one 5F4 5′ flanking region, at least one nucleic acid sequence encoding at least one L3 loop motif region, and at least one nucleic acid sequence encoding at least one 3F4 3′ flanking region.

[0479] In one embodiment, the molecular scaffold may comprise at least one nucleic acid sequence encoding at least one 5F4 5′ flanking region, at least one nucleic acid sequence encoding at least one L3 loop motif region, and at least one nucleic acid sequence encoding at least one 3F5 3′ flanking region.

[0480] In one embodiment, the molecular scaffold may comprise at least one nucleic acid sequence encoding at least one 5F4 5′ flanking region, at least one nucleic acid sequence encoding at least one L3 loop motif region, and at least one nucleic acid sequence encoding at least one 3F6 3′ flanking region.

[0481] In one embodiment, the molecular scaffold may comprise at least one nucleic acid sequence encoding at least one 5F4 5′ flanking region, at least one nucleic acid sequence encoding at least one L3 loop motif region, and at least one nucleic acid sequence encoding at least one 3F7 3′ flanking region.

[0482] In one embodiment, the molecular scaffold may comprise at least one nucleic acid sequence encoding at least one 5F4 5′ flanking region, at least one nucleic acid sequence encoding at least one L3 loop motif region, and at least one nucleic acid sequence encoding at least one 3F8 3′ flanking region.

[0483] In one embodiment, the molecular scaffold may comprise at least one nucleic acid sequence encoding at least one 5F5 5′ flanking region, at least one nucleic acid sequence encoding at least one L3 loop motif region, and at least one nucleic acid sequence encoding at least one 3F1 3′ flanking region.

[0484] In one embodiment, the molecular scaffold may comprise at least one nucleic acid sequence encoding at least one 5F5 5′ flanking region, at least one nucleic acid sequence encoding at least one L3 loop motif region, and at least one nucleic acid sequence encoding at least one 3F2 3′ flanking region.

[0485] In one embodiment, the molecular scaffold may comprise at least one nucleic acid sequence encoding at least one 5F5 5′ flanking region, at least one nucleic acid sequence encoding at least one L3 loop motif region, and at least one nucleic acid sequence encoding at least one 3F3 3′ flanking region.

[0486] In one embodiment, the molecular scaffold may comprise at least one nucleic acid sequence encoding at least one 5F5 5′ flanking region, at least one nucleic acid sequence encoding at least one L3 loop motif region, and at least one nucleic acid sequence encoding at least one 3F4 3′ flanking region.

[0487] In one embodiment, the molecular scaffold may comprise at least one nucleic acid sequence encoding at least one 5F5 5′ flanking region, at least one nucleic acid sequence encoding at least one L3 loop motif region, and at least one nucleic acid sequence encoding at least one 3F5 3′ flanking region.

[0488] In one embodiment, the molecular scaffold may comprise at least one nucleic acid sequence encoding at least one 5F5 5′ flanking region, at least one nucleic acid sequence encoding at least one L3 loop motif region, and at least one nucleic acid sequence encoding at least one 3F6 3′ flanking region.

[0489] In one embodiment, the molecular scaffold may comprise at least one nucleic acid sequence encoding at least one 5F5 5′ flanking region, at least one nucleic acid sequence encoding at least one L3 loop motif region, and at least one nucleic acid sequence encoding at least one 3F7 3′ flanking region.

[0490] In one embodiment, the molecular scaffold may comprise at least one nucleic acid sequence encoding at least one 5F5 5′ flanking region, at least one nucleic acid sequence encoding at least one L3 loop motif region, and at least one nucleic acid sequence encoding at least one 3F8 3′ flanking region.

[0491] In one embodiment, the molecular scaffold may comprise at least one nucleic acid sequence encoding at least one 5F6 5′ flanking region, at least one nucleic acid sequence encoding at least one L3 loop motif region, and at least one nucleic acid sequence encoding at least one 3F1 3′ flanking region.

[0492] In one embodiment, the molecular scaffold may comprise at least one nucleic acid sequence encoding at least one 5F6 5′ flanking region, at least one nucleic acid sequence encoding at least one L3 loop motif region, and at least one nucleic acid sequence encoding at least one 3F2 3′ flanking region.

[0493] In one embodiment, the molecular scaffold may comprise at least one nucleic acid sequence encoding at least one 5F6 5′ flanking region, at least one nucleic acid sequence encoding at least one L3 loop motif region, and at least one nucleic acid sequence encoding at least one 3F3 3′ flanking region.

[0494] In one embodiment, the molecular scaffold may comprise at least one nucleic acid sequence encoding at least one 5F6 5′ flanking region, at least one nucleic acid sequence encoding at least one L3 loop motif region, and at least one nucleic acid sequence encoding at least one 3F4 3′ flanking region.

[0495] In one embodiment, the molecular scaffold may comprise at least one nucleic acid sequence encoding at least one 5F6 5′ flanking region, at least one nucleic acid sequence encoding at least one L3 loop motif region, and at least one nucleic acid sequence encoding at least one 3F5 3′ flanking region.

[0496] In one embodiment, the molecular scaffold may comprise at least one nucleic acid sequence encoding at least one 5F6 5′ flanking region, at least one nucleic acid sequence encoding at least one L3 loop motif region, and at least one nucleic acid sequence encoding at least one 3F6 3′ flanking region.

[0497] In one embodiment, the molecular scaffold may comprise at least one nucleic acid sequence encoding at least one 5F6 5′ flanking region, at least one nucleic acid sequence encoding at least one L3 loop motif region, and at least one nucleic acid sequence encoding at least one 3F7 3′ flanking region.

[0498] In one embodiment, the molecular scaffold may comprise at least one nucleic acid sequence encoding at least one 5F6 5′ flanking region, at least one nucleic acid sequence encoding at least one L3 loop motif region, and at least one nucleic acid sequence encoding at least one 3F8 3′ flanking region.

[0499] In one embodiment, the molecular scaffold may comprise at least one nucleic acid sequence encoding at least one 5F7 5′ flanking region, at least one nucleic acid sequence encoding at least one L3 loop motif region, and at least one nucleic acid sequence encoding at least one 3F1 3′ flanking region.

[0500] In one embodiment, the molecular scaffold may comprise at least one nucleic acid sequence encoding at least one 5F7 5′ flanking region, at least one nucleic acid sequence encoding at least one L3 loop motif region, and at least one nucleic acid sequence encoding at least one 3F2 3′ flanking region.

[0501] In one embodiment, the molecular scaffold may comprise at least one nucleic acid sequence encoding at least one 5F7 5′ flanking region, at least one nucleic acid sequence encoding at least one L3 loop motif region, and at least one nucleic acid sequence encoding at least one 3F3 3′ flanking region.

[0502] In one embodiment, the molecular scaffold may comprise at least one nucleic acid sequence encoding at least one 5F7 5′ flanking region, at least one nucleic acid sequence encoding at least one L3 loop motif region, and at least one nucleic acid sequence encoding at least one 3F4 3′ flanking region.

[0503] In one embodiment, the molecular scaffold may comprise at least one nucleic acid sequence encoding at least one 5F7 5′ flanking region, at least one nucleic acid sequence encoding at least one L3 loop motif region, and at least one nucleic acid sequence encoding at least one 3F5 3′ flanking region.

[0504] In one embodiment, the molecular scaffold may comprise at least one nucleic acid sequence encoding at least one 5F7 5′ flanking region, at least one nucleic acid sequence encoding at least one L3 loop motif region, and at least one nucleic acid sequence encoding at least one 3F6 3′ flanking region.

[0505] In one embodiment, the molecular scaffold may comprise at least one nucleic acid sequence encoding at least one 5F7 5′ flanking region, at least one nucleic acid sequence encoding at least one L3 loop motif region, and at least one nucleic acid sequence encoding at least one 3F7 3′ flanking region.

[0506] In one embodiment, the molecular scaffold may comprise at least one nucleic acid sequence encoding at least one 5F7 5′ flanking region, at least one nucleic acid sequence encoding at least one L3 loop motif region, and at least one nucleic acid sequence encoding at least one 3F8 3′ flanking region.

[0507] In one embodiment, the molecular scaffold may comprise at least one nucleic acid sequence encoding at least one 5F8 5′ flanking region, at least one nucleic acid sequence encoding at least one L3 loop motif region, and at least one nucleic acid sequence encoding at least one 3F1 3′ flanking region.

[0508] In one embodiment, the molecular scaffold may comprise at least one nucleic acid sequence encoding at least one 5F8 5′ flanking region, at least one nucleic acid sequence encoding at least one L3 loop motif region, and at least one nucleic acid sequence encoding at least one 3F2 3′ flanking region.

[0509] In one embodiment, the molecular scaffold may comprise at least one nucleic acid sequence encoding at least one 5F8 5′ flanking region, at least one nucleic acid sequence encoding at least one L3 loop motif region, and at least one nucleic acid sequence encoding at least one 3F3 3′ flanking region.

[0510] In one embodiment, the molecular scaffold may comprise at least one nucleic acid sequence encoding at least one 5F8 5′ flanking region, at least one nucleic acid sequence encoding at least one L3 loop motif region, and at least one nucleic acid sequence encoding at least one 3F4 3′ flanking region.

[0511] In one embodiment, the molecular scaffold may comprise at least one nucleic acid sequence encoding at least one 5F8 5′ flanking region, at least one nucleic acid sequence encoding at least one L3 loop motif region, and at least one nucleic acid sequence encoding at least one 3F5 3′ flanking region.

[0512] In one embodiment, the molecular scaffold may comprise at least one nucleic acid sequence encoding at least one 5F8 5′ flanking region, at least one nucleic acid sequence encoding at least one L3 loop motif region, and at least one nucleic acid sequence encoding at least one 3F6 3′ flanking region.

[0513] In one embodiment, the molecular scaffold may comprise at least one nucleic acid sequence encoding at least one 5F8 5′ flanking region, at least one nucleic acid sequence encoding at least one L3 loop motif region, and at least one nucleic acid sequence encoding at least one 3F7 3′ flanking region.

[0514] In one embodiment, the molecular scaffold may comprise at least one nucleic acid sequence encoding at least one 5F8 5′ flanking region, at least one nucleic acid sequence encoding at least one L3 loop motif region, and at least one nucleic acid sequence encoding at least one 3F8 3′ flanking region.

[0515] In one embodiment, the molecular scaffold may comprise at least one nucleic acid sequence encoding at least one 5F9 5′ flanking region, at least one nucleic acid sequence encoding at least one L3 loop motif region, and at least one nucleic acid sequence encoding at least one 3F1 3′ flanking region.

[0516] In one embodiment, the molecular scaffold may comprise at least one nucleic acid sequence encoding at least one 5F9 5′ flanking region, at least one nucleic acid sequence encoding at least one L3 loop motif region, and at least one nucleic acid sequence encoding at least one 3F2 3′ flanking region.

[0517] In one embodiment, the molecular scaffold may comprise at least one nucleic acid sequence encoding at least one 5F9 5′ flanking region, at least one nucleic acid sequence encoding at least one L3 loop motif region, and at least one nucleic acid sequence encoding at least one 3F3 3′ flanking region.

[0518] In one embodiment, the molecular scaffold may comprise at least one nucleic acid sequence encoding at least one 5F9 5′ flanking region, at least one nucleic acid sequence encoding at least one L3 loop motif region, and at least one nucleic acid sequence encoding at least one 3F4 3′ flanking region.

[0519] In one embodiment, the molecular scaffold may comprise at least one nucleic acid sequence encoding at least one 5F9 5′ flanking region, at least one nucleic acid sequence encoding at least one L3 loop motif region, and at least one nucleic acid sequence encoding at least one 3F5 3′ flanking region.

[0520] In one embodiment, the molecular scaffold may comprise at least one nucleic acid sequence encoding at least one 5F9 5′ flanking region, at least one nucleic acid sequence encoding at least one L3 loop motif region, and at least one nucleic acid sequence encoding at least one 3F6 3′ flanking region.

[0521] In one embodiment, the molecular scaffold may comprise at least one nucleic acid sequence encoding at least one 5F9 5′ flanking region, at least one nucleic acid sequence encoding at least one L3 loop motif region, and at least one nucleic acid sequence encoding at least one 3F7 3′ flanking region.

[0522] In one embodiment, the molecular scaffold may comprise at least one nucleic acid sequence encoding at least one 5F9 5′ flanking region, at least one nucleic acid sequence encoding at least one L3 loop motif region, and at least one nucleic acid sequence encoding at least one 3F8 3′ flanking region.

[0523] In one embodiment, the molecular scaffold may comprise at least one nucleic acid sequence encoding at least one 5F1 5′ flanking region, at least one nucleic acid sequence encoding at least one L4 loop motif region, and at least one nucleic acid sequence encoding at least one 3F1 3′ flanking region.

[0524] In one embodiment, the molecular scaffold may comprise at least one nucleic acid sequence encoding at least one 5F1 5′ flanking region, at least one nucleic acid sequence encoding at least one L4 loop motif region, and at least one nucleic acid sequence encoding at least one 3F2 3′ flanking region.

[0525] In one embodiment, the molecular scaffold may comprise at least one nucleic acid sequence encoding at least one 5F1 5′ flanking region, at least one nucleic acid sequence encoding at least one L4 loop motif region, and at least one nucleic acid sequence encoding at least one 3F3 3′ flanking region.

[0526] In one embodiment, the molecular scaffold may comprise at least one nucleic acid sequence encoding at least one 5F1 5′ flanking region, at least one nucleic acid sequence encoding at least one L4 loop motif region, and at least one nucleic acid sequence encoding at least one 3F4 3′ flanking region.

[0527] In one embodiment, the molecular scaffold may comprise at least one nucleic acid sequence encoding at least one 5F1 5′ flanking region, at least one nucleic acid sequence encoding at least one L4 loop motif region, and at least one nucleic acid sequence encoding at least one 3F5 3′ flanking region.

[0528] In one embodiment, the molecular scaffold may comprise at least one nucleic acid sequence encoding at least one 5F1 5′ flanking region, at least one nucleic acid sequence encoding at least one L4 loop motif region, and at least one nucleic acid sequence encoding at least one 3F6 3′ flanking region.

[0529] In one embodiment, the molecular scaffold may comprise at least one nucleic acid sequence encoding at least one 5F1 5′ flanking region, at least one nucleic acid sequence encoding at least one L4 loop motif region, and at least one nucleic acid sequence encoding at least one 3F7 3′ flanking region.

[0530] In one embodiment, the molecular scaffold may comprise at least one nucleic acid sequence encoding at least one 5F1 5′ flanking region, at least one nucleic acid sequence encoding at least one L4 loop motif region, and at least one nucleic acid sequence encoding at least one 3F8 3′ flanking region.

[0531] In one embodiment, the molecular scaffold may comprise at least one nucleic acid sequence encoding at least one 5F2 5′ flanking region, at least one nucleic acid sequence encoding at least one L4 loop motif region, and at least one nucleic acid sequence encoding at least one 3F1 3′ flanking region.

[0532] In one embodiment, the molecular scaffold may comprise at least one nucleic acid sequence encoding at least one 5F2 5′ flanking region, at least one nucleic acid sequence encoding at least one L4 loop motif region, and at least one nucleic acid sequence encoding at least one 3F2 3′ flanking region.

[0533] In one embodiment, the molecular scaffold may comprise at least one nucleic acid sequence encoding at least one 5F2 5′ flanking region, at least one nucleic acid sequence encoding at least one L4 loop motif region, and at least one nucleic acid sequence encoding at least one 3F3 3′ flanking region.

[0534] In one embodiment, the molecular scaffold may comprise at least one nucleic acid sequence encoding at least one 5F2 5′ flanking region, at least one nucleic acid sequence encoding at least one L4 loop motif region, and at least one nucleic acid sequence encoding at least one 3F4 3′ flanking region.

[0535] In one embodiment, the molecular scaffold may comprise at least one nucleic acid sequence encoding at least one 5F2 5′ flanking region, at least one nucleic acid sequence encoding at least one L4 loop motif region, and at least one nucleic acid sequence encoding at least one 3F5 3′ flanking region.

[0536] In one embodiment, the molecular scaffold may comprise at least one nucleic acid sequence encoding at least one 5F2 5′ flanking region, at least one nucleic acid sequence encoding at least one L4 loop motif region, and at least one nucleic acid sequence encoding at least one 3F6 3′ flanking region.

[0537] In one embodiment, the molecular scaffold may comprise at least one nucleic acid sequence encoding at least one 5F2 5′ flanking region, at least one nucleic acid sequence encoding at least one L4 loop motif region, and at least one nucleic acid sequence encoding at least one 3F7 3′ flanking region.

[0538] In one embodiment, the molecular scaffold may comprise at least one nucleic acid sequence encoding at least one 5F2 5′ flanking region, at least one nucleic acid sequence encoding at least one L4 loop motif region, and at least one nucleic acid sequence encoding at least one 3F8 3′ flanking region.

[0539] In one embodiment, the molecular scaffold may comprise at least one nucleic acid sequence encoding at least one 5F3 5′ flanking region, at least one nucleic acid sequence encoding at least one L4 loop motif region, and at least one nucleic acid sequence encoding at least one 3F1 3′ flanking region.

[0540] In one embodiment, the molecular scaffold may comprise at least one nucleic acid sequence encoding at least one 5F3 5′ flanking region, at least one nucleic acid sequence encoding at least one L4 loop motif region, and at least one nucleic acid sequence encoding at least one 3F2 3′ flanking region.

[0541] In one embodiment, the molecular scaffold may comprise at least one nucleic acid sequence encoding at least one 5F3 5′ flanking region, at least one nucleic acid sequence encoding at least one L4 loop motif region, and at least one nucleic acid sequence encoding at least one 3F3 3′ flanking region.

[0542] In one embodiment, the molecular scaffold may comprise at least one nucleic acid sequence encoding at least one 5F3 5′ flanking region, at least one nucleic acid sequence encoding at least one L4 loop motif region, and at least one nucleic acid sequence encoding at least one 3F4 3′ flanking region.

[0543] In one embodiment, the molecular scaffold may comprise at least one nucleic acid sequence encoding at least one 5F3 5′ flanking region, at least one nucleic acid sequence encoding at least one L4 loop motif region, and at least one nucleic acid sequence encoding at least one 3F5 3′ flanking region.

[0544] In one embodiment, the molecular scaffold may comprise at least one nucleic acid sequence encoding at least one 5F3 5′ flanking region, at least one nucleic acid sequence encoding at least one L4 loop motif region, and at least one nucleic acid sequence encoding at least one 3F6 3′ flanking region.

[0545] In one embodiment, the molecular scaffold may comprise at least one nucleic acid sequence encoding at least one 5F3 5′ flanking region, at least one nucleic acid sequence encoding at least one L4 loop motif region, and at least one nucleic acid sequence encoding at least one 3F7 3′ flanking region.

[0546] In one embodiment, the molecular scaffold may comprise at least one nucleic acid sequence encoding at least one 5F3 5′ flanking region, at least one nucleic acid sequence encoding at least one L4 loop motif region, and at least one nucleic acid sequence encoding at least one 3F8 3′ flanking region.

[0547] In one embodiment, the molecular scaffold may comprise at least one nucleic acid sequence encoding at least one 5F4 5′ flanking region, at least one nucleic acid sequence encoding at least one L4 loop motif region, and at least one nucleic acid sequence encoding at least one 3F1 3′ flanking region.

[0548] In one embodiment, the molecular scaffold may comprise at least one nucleic acid sequence encoding at least one 5F4 5′ flanking region, at least one nucleic acid sequence encoding at least one L4 loop motif region, and at least one nucleic acid sequence encoding at least one 3F2 3′ flanking region.

[0549] In one embodiment, the molecular scaffold may comprise at least one nucleic acid sequence encoding at least one 5F4 5′ flanking region, at least one nucleic acid sequence encoding at least one L4 loop motif region, and at least one nucleic acid sequence encoding at least one 3F3 3′ flanking region.

[0550] In one embodiment, the molecular scaffold may comprise at least one nucleic acid sequence encoding at least one 5F4 5′ flanking region, at least one nucleic acid sequence encoding at least one L4 loop motif region, and at least one nucleic acid sequence encoding at least one 3F4 3′ flanking region.

[0551] In one embodiment, the molecular scaffold may comprise at least one nucleic acid sequence encoding at least one 5F4 5′ flanking region, at least one nucleic acid sequence encoding at least one L4 loop motif region, and at least one nucleic acid sequence encoding at least one 3F5 3′ flanking region.

[0552] In one embodiment, the molecular scaffold may comprise at least one nucleic acid sequence encoding at least one 5F4 5′ flanking region, at least one nucleic acid sequence encoding at least one L4 loop motif region, and at least one nucleic acid sequence encoding at least one 3F6 3′ flanking region.

[0553] In one embodiment, the molecular scaffold may comprise at least one nucleic acid sequence encoding at least one 5F4 5′ flanking region, at least one nucleic acid sequence encoding at least one L4 loop motif region, and at least one nucleic acid sequence encoding at least one 3F7 3′ flanking region.

[0554] In one embodiment, the molecular scaffold may comprise at least one nucleic acid sequence encoding at least one 5F4 5′ flanking region, at least one nucleic acid sequence encoding at least one L4 loop motif region, and at least one nucleic acid sequence encoding at least one 3F8 3′ flanking region.

[0555] In one embodiment, the molecular scaffold may comprise at least one nucleic acid sequence encoding at least one 5F5 5′ flanking region, at least one nucleic acid sequence encoding at least one L4 loop motif region, and at least one nucleic acid sequence encoding at least one 3F1 3′ flanking region.

[0556] In one embodiment, the molecular scaffold may comprise at least one nucleic acid sequence encoding at least one 5F5 5′ flanking region, at least one nucleic acid sequence encoding at least one L4 loop motif region, and at least one nucleic acid sequence encoding at least one 3F2 3′ flanking region.

[0557] In one embodiment, the molecular scaffold may comprise at least one nucleic acid sequence encoding at least one 5F5 5′ flanking region, at least one nucleic acid sequence encoding at least one L4 loop motif region, and at least one nucleic acid sequence encoding at least one 3F3 3′ flanking region.

[0558] In one embodiment, the molecular scaffold may comprise at least one nucleic acid sequence encoding at least one 5F5 5′ flanking region, at least one nucleic acid sequence encoding at least one L4 loop motif region, and at least one nucleic acid sequence encoding at least one 3F4 3′ flanking region.

[0559] In one embodiment, the molecular scaffold may comprise at least one nucleic acid sequence encoding at least one 5F5 5′ flanking region, at least one nucleic acid sequence encoding at least one L4 loop motif region, and at least one nucleic acid sequence encoding at least one 3F5 3′ flanking region.

[0560] In one embodiment, the molecular scaffold may comprise at least one nucleic acid sequence encoding at least one 5F5 5′ flanking region, at least one nucleic acid sequence encoding at least one L4 loop motif region, and at least one nucleic acid sequence encoding at least one 3F6 3′ flanking region.

[0561] In one embodiment, the molecular scaffold may comprise at least one nucleic acid sequence encoding at least one 5F5 5′ flanking region, at least one nucleic acid sequence encoding at least one L4 loop motif region, and at least one nucleic acid sequence encoding at least one 3F7 3′ flanking region.

[0562] In one embodiment, the molecular scaffold may comprise at least one nucleic acid sequence encoding at least one 5F5 5′ flanking region, at least one nucleic acid sequence encoding at least one L4 loop motif region, and at least one nucleic acid sequence encoding at least one 3F8 3′ flanking region.

[0563] In one embodiment, the molecular scaffold may comprise at least one nucleic acid sequence encoding at least one 5F6 5′ flanking region, at least one nucleic acid sequence encoding at least one L4 loop motif region, and at least one nucleic acid sequence encoding at least one 3F1 3′ flanking region.

[0564] In one embodiment, the molecular scaffold may comprise at least one nucleic acid sequence encoding at least one 5F6 5′ flanking region, at least one nucleic acid sequence encoding at least one L4 loop motif region, and at least one nucleic acid sequence encoding at least one 3F2 3′ flanking region.

[0565] In one embodiment, the molecular scaffold may comprise at least one nucleic acid sequence encoding at least one 5F6 5′ flanking region, at least one nucleic acid sequence encoding at least one L4 loop motif region, and at least one nucleic acid sequence encoding at least one 3F3 3′ flanking region.

[0566] In one embodiment, the molecular scaffold may comprise at least one nucleic acid sequence encoding at least one 5F6 5′ flanking region, at least one nucleic acid sequence encoding at least one L4 loop motif region, and at least one nucleic acid sequence encoding at least one 3F4 3′ flanking region.

[0567] In one embodiment, the molecular scaffold may comprise at least one nucleic acid sequence encoding at least one 5F6 5′ flanking region, at least one nucleic acid sequence encoding at least one L4 loop motif region, and at least one nucleic acid sequence encoding at least one 3F5 3′ flanking region.

[0568] In one embodiment, the molecular scaffold may comprise at least one nucleic acid sequence encoding at least one 5F6 5′ flanking region, at least one nucleic acid sequence encoding at least one L4 loop motif region, and at least one nucleic acid sequence encoding at least one 3F6 3′ flanking region.

[0569] In one embodiment, the molecular scaffold may comprise at least one nucleic acid sequence encoding at least one 5F6 5′ flanking region, at least one nucleic acid sequence encoding at least one L4 loop motif region, and at least one nucleic acid sequence encoding at least one 3F7 3′ flanking region.

[0570] In one embodiment, the molecular scaffold may comprise at least one nucleic acid sequence encoding at least one 5F6 5′ flanking region, at least one nucleic acid sequence encoding at least one L4 loop motif region, and at least one nucleic acid sequence encoding at least one 3F8 3′ flanking region.

[0571] In one embodiment, the molecular scaffold may comprise at least one nucleic acid sequence encoding at least one 5F7 5′ flanking region, at least one nucleic acid sequence encoding at least one L4 loop motif region, and at least one nucleic acid sequence encoding at least one 3F1 3′ flanking region.

[0572] In one embodiment, the molecular scaffold may comprise at least one nucleic acid sequence encoding at least one 5F7 5′ flanking region, at least one nucleic acid sequence encoding at least one L4 loop motif region, and at least one nucleic acid sequence encoding at least one 3F2 3′ flanking region.

[0573] In one embodiment, the molecular scaffold may comprise at least one nucleic acid sequence encoding at least one 5F7 5′ flanking region, at least one nucleic acid sequence encoding at least one L4 loop motif region, and at least one nucleic acid sequence encoding at least one 3F3 3′ flanking region.

[0574] In one embodiment, the molecular scaffold may comprise at least one nucleic acid sequence encoding at least one 5F7 5′ flanking region, at least one nucleic acid sequence encoding at least one L4 loop motif region, and at least one nucleic acid sequence encoding at least one 3F4 3′ flanking region.

[0575] In one embodiment, the molecular scaffold may comprise at least one nucleic acid sequence encoding at least one 5F7 5′ flanking region, at least one nucleic acid sequence encoding at least one L4 loop motif region, and at least one nucleic acid sequence encoding at least one 3F5 3′ flanking region.

[0576] In one embodiment, the molecular scaffold may comprise at least one nucleic acid sequence encoding at least one 5F7 5′ flanking region, at least one nucleic acid sequence encoding at least one L4 loop motif region, and at least one nucleic acid sequence encoding at least one 3F6 3′ flanking region.

[0577] In one embodiment, the molecular scaffold may comprise at least one nucleic acid sequence encoding at least one 5F7 5′ flanking region, at least one nucleic acid sequence encoding at least one L4 loop motif region, and at least one nucleic acid sequence encoding at least one 3F7 3′ flanking region.

[0578] In one embodiment, the molecular scaffold may comprise at least one nucleic acid sequence encoding at least one 5F7 5′ flanking region, at least one nucleic acid sequence encoding at least one L4 loop motif region, and at least one nucleic acid sequence encoding at least one 3F8 3′ flanking region.

[0579] In one embodiment, the molecular scaffold may comprise at least one nucleic acid sequence encoding at least one 5F8 5′ flanking region, at least one nucleic acid sequence encoding at least one L4 loop motif region, and at least one nucleic acid sequence encoding at least one 3F1 3′ flanking region.

[0580] In one embodiment, the molecular scaffold may comprise at least one nucleic acid sequence encoding at least one 5F8 5′ flanking region, at least one nucleic acid sequence encoding at least one L4 loop motif region, and at least one nucleic acid sequence encoding at least one 3F2 3′ flanking region.

[0581] In one embodiment, the molecular scaffold may comprise at least one nucleic acid sequence encoding at least one 5F8 5′ flanking region, at least one nucleic acid sequence encoding at least one L4 loop motif region, and at least one nucleic acid sequence encoding at least one 3F3 3′ flanking region.

[0582] In one embodiment, the molecular scaffold may comprise at least one nucleic acid sequence encoding at least one 5F8 5′ flanking region, at least one nucleic acid sequence encoding at least one L4 loop motif region, and at least one nucleic acid sequence encoding at least one 3F4 3′ flanking region.

[0583] In one embodiment, the molecular scaffold may comprise at least one nucleic acid sequence encoding at least one 5F8 5′ flanking region, at least one nucleic acid sequence encoding at least one L4 loop motif region, and at least one nucleic acid sequence encoding at least one 3F5 3′ flanking region.

[0584] In one embodiment, the molecular scaffold may comprise at least one nucleic acid sequence encoding at least one 5F8 5′ flanking region, at least one nucleic acid sequence encoding at least one L4 loop motif region, and at least one nucleic acid sequence encoding at least one 3F6 3′ flanking region.

[0585] In one embodiment, the molecular scaffold may comprise at least one nucleic acid sequence encoding at least one 5F8 5′ flanking region, at least one nucleic acid sequence encoding at least one L4 loop motif region, and at least one nucleic acid sequence encoding at least one 3F7 3′ flanking region.

[0586] In one embodiment, the molecular scaffold may comprise at least one nucleic acid sequence encoding at least one 5F8 5′ flanking region, at least one nucleic acid sequence encoding at least one L4 loop motif region, and at least one nucleic acid sequence encoding at least one 3F8 3′ flanking region.

[0587] In one embodiment, the molecular scaffold may comprise at least one nucleic acid sequence encoding at least one 5F9 5′ flanking region, at least one nucleic acid sequence encoding at least one L4 loop motif region, and at least one nucleic acid sequence encoding at least one 3F1 3′ flanking region.

[0588] In one embodiment, the molecular scaffold may comprise at least one nucleic acid sequence encoding at least one 5F9 5′ flanking region, at least one nucleic acid sequence encoding at least one L4 loop motif region, and at least one nucleic acid sequence encoding at least one 3F2 3′ flanking region.

[0589] In one embodiment, the molecular scaffold may comprise at least one nucleic acid sequence encoding at least one 5F9 5′ flanking region, at least one nucleic acid sequence encoding at least one L4 loop motif region, and at least one nucleic acid sequence encoding at least one 3F3 3′ flanking region.

[0590] In one embodiment, the molecular scaffold may comprise at least one nucleic acid sequence encoding at least one 5F9 5′ flanking region, at least one nucleic acid sequence encoding at least one L4 loop motif region, and at least one nucleic acid sequence encoding at least one 3F4 3′ flanking region.

[0591] In one embodiment, the molecular scaffold may comprise at least one nucleic acid sequence encoding at least one 5F9 5′ flanking region, at least one nucleic acid sequence encoding at least one L4 loop motif region, and at least one nucleic acid sequence encoding at least one 3F5 3′ flanking region.

[0592] In one embodiment, the molecular scaffold may comprise at least one nucleic acid sequence encoding at least one 5F9 5′ flanking region, at least one nucleic acid sequence encoding at least one L4 loop motif region, and at least one nucleic acid sequence encoding at least one 3F6 3′ flanking region.

[0593] In one embodiment, the molecular scaffold may comprise at least one nucleic acid sequence encoding at least one 5F9 5′ flanking region, at least one nucleic acid sequence encoding at least one L4 loop motif region, and at least one nucleic acid sequence encoding at least one 3F7 3′ flanking region.

[0594] In one embodiment, the molecular scaffold may comprise at least one nucleic acid sequence encoding at least one 5F9 5′ flanking region, at least one nucleic acid sequence encoding at least one L4 loop motif region, and at least one nucleic acid sequence encoding at least one 3F8 3′ flanking region.

[0595] In one embodiment, the molecular scaffold may comprise at least one nucleic acid sequence encoding at least one 5F1 5′ flanking region, at least one nucleic acid sequence encoding at least one L5 loop motif region, and at least one nucleic acid sequence encoding at least one 3F1 3′ flanking region.

[0596] In one embodiment, the molecular scaffold may comprise at least one nucleic acid sequence encoding at least one 5F1 5′ flanking region, at least one nucleic acid sequence encoding at least one L5 loop motif region, and at least one nucleic acid sequence encoding at least one 3F2 3′ flanking region.

[0597] In one embodiment, the molecular scaffold may comprise at least one nucleic acid sequence encoding at least one 5F1 5′ flanking region, at least one nucleic acid sequence encoding at least one L5 loop motif region, and at least one nucleic acid sequence encoding at least one 3F3 3′ flanking region.

[0598] In one embodiment, the molecular scaffold may comprise at least one nucleic acid sequence encoding at least one 5F1 5′ flanking region, at least one nucleic acid sequence encoding at least one L5 loop motif region, and at least one nucleic acid sequence encoding at least one 3F4 3′ flanking region.

[0599] In one embodiment, the molecular scaffold may comprise at least one nucleic acid sequence encoding at least one 5F1 5′ flanking region, at least one nucleic acid sequence encoding at least one L5 loop motif region, and at least one nucleic acid sequence encoding at least one 3F5 3′ flanking region.

[0600] In one embodiment, the molecular scaffold may comprise at least one nucleic acid sequence encoding at least one 5F1 5′ flanking region, at least one nucleic acid sequence encoding at least one L5 loop motif region, and at least one nucleic acid sequence encoding at least one 3F6 3′ flanking region.

[0601] In one embodiment, the molecular scaffold may comprise at least one nucleic acid sequence encoding at least one 5F1 5′ flanking region, at least one nucleic acid sequence encoding at least one L5 loop motif region, and at least one nucleic acid sequence encoding at least one 3F7 3′ flanking region.

[0602] In one embodiment, the molecular scaffold may comprise at least one nucleic acid sequence encoding at least one 5F1 5′ flanking region, at least one nucleic acid sequence encoding at least one L5 loop motif region, and at least one nucleic acid sequence encoding at least one 3F8 3′ flanking region.

[0603] In one embodiment, the molecular scaffold may comprise at least one nucleic acid sequence encoding at least one 5F2 5′ flanking region, at least one nucleic acid sequence encoding at least one L5 loop motif region, and at least one nucleic acid sequence encoding at least one 3F1 3′ flanking region.

[0604] In one embodiment, the molecular scaffold may comprise at least one nucleic acid sequence encoding at least one 5F2 5′ flanking region, at least one nucleic acid sequence encoding at least one L5 loop motif region, and at least one nucleic acid sequence encoding at least one 3F2 3′ flanking region.

[0605] In one embodiment, the molecular scaffold may comprise at least one nucleic acid sequence encoding at least one 5F2 5′ flanking region, at least one nucleic acid sequence encoding at least one L5 loop motif region, and at least one nucleic acid sequence encoding at least one 3F3 3′ flanking region.

[0606] In one embodiment, the molecular scaffold may comprise at least one nucleic acid sequence encoding at least one 5F2 5′ flanking region, at least one nucleic acid sequence encoding at least one L5 loop motif region, and at least one nucleic acid sequence encoding at least one 3F4 3′ flanking region.

[0607] In one embodiment, the molecular scaffold may comprise at least one nucleic acid sequence encoding at least one 5F2 5′ flanking region, at least one nucleic acid sequence encoding at least one L5 loop motif region, and at least one nucleic acid sequence encoding at least one 3F5 3′ flanking region.

[0608] In one embodiment, the molecular scaffold may comprise at least one nucleic acid sequence encoding at least one 5F2 5′ flanking region, at least one nucleic acid sequence encoding at least one L5 loop motif region, and at least one nucleic acid sequence encoding at least one 3F6 3′ flanking region.

[0609] In one embodiment, the molecular scaffold may comprise at least one nucleic acid sequence encoding at least one 5F2 5′ flanking region, at least one nucleic acid sequence encoding at least one L5 loop motif region, and at least one nucleic acid sequence encoding at least one 3F7 3′ flanking region.

[0610] In one embodiment, the molecular scaffold may comprise at least one nucleic acid sequence encoding at least one 5F2 5′ flanking region, at least one nucleic acid sequence encoding at least one L5 loop motif region, and at least one nucleic acid sequence encoding at least one 3F8 3′ flanking region.

[0611] In one embodiment, the molecular scaffold may comprise at least one nucleic acid sequence encoding at least one 5F3 5′ flanking region, at least one nucleic acid sequence encoding at least one L5 loop motif region, and at least one nucleic acid sequence encoding at least one 3F1 3′ flanking region.

[0612] In one embodiment, the molecular scaffold may comprise at least one nucleic acid sequence encoding at least one 5F3 5′ flanking region, at least one nucleic acid sequence encoding at least one L5 loop motif region, and at least one nucleic acid sequence encoding at least one 3F2 3′ flanking region.

[0613] In one embodiment, the molecular scaffold may comprise at least one nucleic acid sequence encoding at least one 5F3 5′ flanking region, at least one nucleic acid sequence encoding at least one L5 loop motif region, and at least one nucleic acid sequence encoding at least one 3F3 3′ flanking region.

[0614] In one embodiment, the molecular scaffold may comprise at least one nucleic acid sequence encoding at least one 5F3 5′ flanking region, at least one nucleic acid sequence encoding at least one L5 loop motif region, and at least one nucleic acid sequence encoding at least one 3F4 3′ flanking region.

[0615] In one embodiment, the molecular scaffold may comprise at least one nucleic acid sequence encoding at least one 5F3 5′ flanking region, at least one nucleic acid sequence encoding at least one L5 loop motif region, and at least one nucleic acid sequence encoding at least one 3F5 3′ flanking region.

[0616] In one embodiment, the molecular scaffold may comprise at least one nucleic acid sequence encoding at least one 5F3 5′ flanking region, at least one nucleic acid sequence encoding at least one L5 loop motif region, and at least one nucleic acid sequence encoding at least one 3F6 3′ flanking region.

[0617] In one embodiment, the molecular scaffold may comprise at least one nucleic acid sequence encoding at least one 5F3 5′ flanking region, at least one nucleic acid sequence encoding at least one L5 loop motif region, and at least one nucleic acid sequence encoding at least one 3F7 3′ flanking region.

[0618] In one embodiment, the molecular scaffold may comprise at least one nucleic acid sequence encoding at least one 5F3 5′ flanking region, at least one nucleic acid sequence encoding at least one L5 loop motif region, and at least one nucleic acid sequence encoding at least one 3F8 3′ flanking region.

[0619] In one embodiment, the molecular scaffold may comprise at least one nucleic acid sequence encoding at least one 5F4 5′ flanking region, at least one nucleic acid sequence encoding at least one L5 loop motif region, and at least one nucleic acid sequence encoding at least one 3F1 3′ flanking region.

[0620] In one embodiment, the molecular scaffold may comprise at least one nucleic acid sequence encoding at least one 5F4 5′ flanking region, at least one nucleic acid sequence encoding at least one L5 loop motif region, and at least one nucleic acid sequence encoding at least one 3F2 3′ flanking region.

[0621] In one embodiment, the molecular scaffold may comprise at least one nucleic acid sequence encoding at least one 5F4 5′ flanking region, at least one nucleic acid sequence encoding at least one L5 loop motif region, and at least one nucleic acid sequence encoding at least one 3F3 3′ flanking region.

[0622] In one embodiment, the molecular scaffold may comprise at least one nucleic acid sequence encoding at least one 5F4 5′ flanking region, at least one nucleic acid sequence encoding at least one L5 loop motif region, and at least one nucleic acid sequence encoding at least one 3F4 3′ flanking region.

[0623] In one embodiment, the molecular scaffold may comprise at least one nucleic acid sequence encoding at least one 5F4 5′ flanking region, at least one nucleic acid sequence encoding at least one L5 loop motif region, and at least one nucleic acid sequence encoding at least one 3F5 3′ flanking region.

[0624] In one embodiment, the molecular scaffold may comprise at least one nucleic acid sequence encoding at least one 5F4 5′ flanking region, at least one nucleic acid sequence encoding at least one L5 loop motif region, and at least one nucleic acid sequence encoding at least one 3F6 3′ flanking region.

[0625] In one embodiment, the molecular scaffold may comprise at least one nucleic acid sequence encoding at least one 5F4 5′ flanking region, at least one nucleic acid sequence encoding at least one L5 loop motif region, and at least one nucleic acid sequence encoding at least one 3F7 3′ flanking region.

[0626] In one embodiment, the molecular scaffold may comprise at least one nucleic acid sequence encoding at least one 5F4 5′ flanking region, at least one nucleic acid sequence encoding at least one L5 loop motif region, and at least one nucleic acid sequence encoding at least one 3F8 3′ flanking region.

[0627] In one embodiment, the molecular scaffold may comprise at least one nucleic acid sequence encoding at least one 5F5 5′ flanking region, at least one nucleic acid sequence encoding at least one L5 loop motif region, and at least one nucleic acid sequence encoding at least one 3F1 3′ flanking region.

[0628] In one embodiment, the molecular scaffold may comprise at least one nucleic acid sequence encoding at least one 5F5 5′ flanking region, at least one nucleic acid sequence encoding at least one L5 loop motif region, and at least one nucleic acid sequence encoding at least one 3F2 3′ flanking region.

[0629] In one embodiment, the molecular scaffold may comprise at least one nucleic acid sequence encoding at least one 5F5 5′ flanking region, at least one nucleic acid sequence encoding at least one L5 loop motif region, and at least one nucleic acid sequence encoding at least one 3F3 3′ flanking region.

[0630] In one embodiment, the molecular scaffold may comprise at least one nucleic acid sequence encoding at least one 5F5 5′ flanking region, at least one nucleic acid sequence encoding at least one L5 loop motif region, and at least one nucleic acid sequence encoding at least one 3F4 3′ flanking region.

[0631] In one embodiment, the molecular scaffold may comprise at least one nucleic acid sequence encoding at least one 5F5 5′ flanking region, at least one nucleic acid sequence encoding at least one L5 loop motif region, and at least one nucleic acid sequence encoding at least one 3F5 3′ flanking region.

[0632] In one embodiment, the molecular scaffold may comprise at least one nucleic acid sequence encoding at least one 5F5 5′ flanking region, at least one nucleic acid sequence encoding at least one L5 loop motif region, and at least one nucleic acid sequence encoding at least one 3F6 3′ flanking region.

[0633] In one embodiment, the molecular scaffold may comprise at least one nucleic acid sequence encoding at least one 5F5 5′ flanking region, at least one nucleic acid sequence encoding at least one L5 loop motif region, and at least one nucleic acid sequence encoding at least one 3F7 3′ flanking region.

[0634] In one embodiment, the molecular scaffold may comprise at least one nucleic acid sequence encoding at least one 5F5 5′ flanking region, at least one nucleic acid sequence encoding at least one L5 loop motif region, and at least one nucleic acid sequence encoding at least one 3F8 3′ flanking region.

[0635] In one embodiment, the molecular scaffold may comprise at least one nucleic acid sequence encoding at least one 5F6 5′ flanking region, at least one nucleic acid sequence encoding at least one L5 loop motif region, and at least one nucleic acid sequence encoding at least one 3F1 3′ flanking region.

[0636] In one embodiment, the molecular scaffold may comprise at least one nucleic acid sequence encoding at least one 5F6 5′ flanking region, at least one nucleic acid sequence encoding at least one L5 loop motif region, and at least one nucleic acid sequence encoding at least one 3F2 3′ flanking region.

[0637] In one embodiment, the molecular scaffold may comprise at least one nucleic acid sequence encoding at least one 5F6 5′ flanking region, at least one nucleic acid sequence encoding at least one L5 loop motif region, and at least one nucleic acid sequence encoding at least one 3F3 3′ flanking region.

[0638] In one embodiment, the molecular scaffold may comprise at least one nucleic acid sequence encoding at least one 5F6 5′ flanking region, at least one nucleic acid sequence encoding at least one L5 loop motif region, and at least one nucleic acid sequence encoding at least one 3F4 3′ flanking region.

[0639] In one embodiment, the molecular scaffold may comprise at least one nucleic acid sequence encoding at least one 5F6 5′ flanking region, at least one nucleic acid sequence encoding at least one L5 loop motif region, and at least one nucleic acid sequence encoding at least one 3F5 3′ flanking region.

[0640] In one embodiment, the molecular scaffold may comprise at least one nucleic acid sequence encoding at least one 5F6 5′ flanking region, at least one nucleic acid sequence encoding at least one L5 loop motif region, and at least one nucleic acid sequence encoding at least one 3F6 3′ flanking region.

[0641] In one embodiment, the molecular scaffold may comprise at least one nucleic acid sequence encoding at least one 5F6 5′ flanking region, at least one nucleic acid sequence encoding at least one L5 loop motif region, and at least one nucleic acid sequence encoding at least one 3F7 3′ flanking region.

[0642] In one embodiment, the molecular scaffold may comprise at least one nucleic acid sequence encoding at least one 5F6 5′ flanking region, at least one nucleic acid sequence encoding at least one L5 loop motif region, and at least one nucleic acid sequence encoding at least one 3F8 3′ flanking region.

[0643] In one embodiment, the molecular scaffold may comprise at least one nucleic acid sequence encoding at least one 5F7 5′ flanking region, at least one nucleic acid sequence encoding at least one L5 loop motif region, and at least one nucleic acid sequence encoding at least one 3F1 3′ flanking region.

[0644] In one embodiment, the molecular scaffold may comprise at least one nucleic acid sequence encoding at least one 5F7 5′ flanking region, at least one nucleic acid sequence encoding at least one L5 loop motif region, and at least one nucleic acid sequence encoding at least one 3F2 3′ flanking region.

[0645] In one embodiment, the molecular scaffold may comprise at least one nucleic acid sequence encoding at least one 5F7 5′ flanking region, at least one nucleic acid sequence encoding at least one L5 loop motif region, and at least one nucleic acid sequence encoding at least one 3F3 3′ flanking region.

[0646] In one embodiment, the molecular scaffold may comprise at least one nucleic acid sequence encoding at least one 5F7 5′ flanking region, at least one nucleic acid sequence encoding at least one L5 loop motif region, and at least one nucleic acid sequence encoding at least one 3F4 3′ flanking region.

[0647] In one embodiment, the molecular scaffold may comprise at least one nucleic acid sequence encoding at least one 5F7 5′ flanking region, at least one nucleic acid sequence encoding at least one L5 loop motif region, and at least one nucleic acid sequence encoding at least one 3F5 3′ flanking region.

[0648] In one embodiment, the molecular scaffold may comprise at least one nucleic acid sequence encoding at least one 5F7 5′ flanking region, at least one nucleic acid sequence encoding at least one L5 loop motif region, and at least one nucleic acid sequence encoding at least one 3F6 3′ flanking region.

[0649] In one embodiment, the molecular scaffold may comprise at least one nucleic acid sequence encoding at least one 5F7 5′ flanking region, at least one nucleic acid sequence encoding at least one L5 loop motif region, and at least one nucleic acid sequence encoding at least one 3F7 3′ flanking region.

[0650] In one embodiment, the molecular scaffold may comprise at least one nucleic acid sequence encoding at least one 5F7 5′ flanking region, at least one nucleic acid sequence encoding at least one L5 loop motif region, and at least one nucleic acid sequence encoding at least one 3F8 3′ flanking region.

[0651] In one embodiment, the molecular scaffold may comprise at least one nucleic acid sequence encoding at least one 5F8 5′ flanking region, at least one nucleic acid sequence encoding at least one L5 loop motif region, and at least one nucleic acid sequence encoding at least one 3F1 3′ flanking region.

[0652] In one embodiment, the molecular scaffold may comprise at least one nucleic acid sequence encoding at least one 5F8 5′ flanking region, at least one nucleic acid sequence encoding at least one L5 loop motif region, and at least one nucleic acid sequence encoding at least one 3F2 3′ flanking region.

[0653] In one embodiment, the molecular scaffold may comprise at least one nucleic acid sequence encoding at least one 5F8 5′ flanking region, at least one nucleic acid sequence encoding at least one L5 loop motif region, and at least one nucleic acid sequence encoding at least one 3F3 3′ flanking region.

[0654] In one embodiment, the molecular scaffold may comprise at least one nucleic acid sequence encoding at least one 5F8 5′ flanking region, at least one nucleic acid sequence encoding at least one L5 loop motif region, and at least one nucleic acid sequence encoding at least one 3F4 3′ flanking region.

[0655] In one embodiment, the molecular scaffold may comprise at least one nucleic acid sequence encoding at least one 5F8 5′ flanking region, at least one nucleic acid sequence encoding at least one L5 loop motif region, and at least one nucleic acid sequence encoding at least one 3F5 3′ flanking region.

[0656] In one embodiment, the molecular scaffold may comprise at least one nucleic acid sequence encoding at least one 5F8 5′ flanking region, at least one nucleic acid sequence encoding at least one L5 loop motif region, and at least one nucleic acid sequence encoding at least one 3F6 3′ flanking region.

[0657] In one embodiment, the molecular scaffold may comprise at least one nucleic acid sequence encoding at least one 5F8 5′ flanking region, at least one nucleic acid sequence encoding at least one L5 loop motif region, and at least one nucleic acid sequence encoding at least one 3F7 3′ flanking region.

[0658] In one embodiment, the molecular scaffold may comprise at least one nucleic acid sequence encoding at least one 5F8 5′ flanking region, at least one nucleic acid sequence encoding at least one L5 loop motif region, and at least one nucleic acid sequence encoding at least one 3F8 3′ flanking region.

[0659] In one embodiment, the molecular scaffold may comprise at least one nucleic acid sequence encoding at least one 5F9 5′ flanking region, at least one nucleic acid sequence encoding at least one L5 loop motif region, and at least one nucleic acid sequence encoding at least one 3F1 3′ flanking region.

[0660] In one embodiment, the molecular scaffold may comprise at least one nucleic acid sequence encoding at least one 5F9 5′ flanking region, at least one nucleic acid sequence encoding at least one L5 loop motif region, and at least one nucleic acid sequence encoding at least one 3F2 3′ flanking region.

[0661] In one embodiment, the molecular scaffold may comprise at least one nucleic acid sequence encoding at least one 5F9 5′ flanking region, at least one nucleic acid sequence encoding at least one L5 loop motif region, and at least one nucleic acid sequence encoding at least one 3F3 3′ flanking region.

[0662] In one embodiment, the molecular scaffold may comprise at least one nucleic acid sequence encoding at least one 5F9 5′ flanking region, at least one nucleic acid sequence encoding at least one L5 loop motif region, and at least one nucleic acid sequence encoding at least one 3F4 3′ flanking region.

[0663] In one embodiment, the molecular scaffold may comprise at least one nucleic acid sequence encoding at least one 5F9 5′ flanking region, at least one nucleic acid sequence encoding at least one L5 loop motif region, and at least one nucleic acid sequence encoding at least one 3F5 3′ flanking region.

[0664] In one embodiment, the molecular scaffold may comprise at least one nucleic acid sequence encoding at least one 5F9 5′ flanking region, at least one nucleic acid sequence encoding at least one L5 loop motif region, and at least one nucleic acid sequence encoding at least one 3F6 3′ flanking region.

[0665] In one embodiment, the molecular scaffold may comprise at least one nucleic acid sequence encoding at least one 5F9 5′ flanking region, at least one nucleic acid sequence encoding at least one L5 loop motif region, and at least one nucleic acid sequence encoding at least one 3F7 3′ flanking region.

[0666] In one embodiment, the molecular scaffold may comprise at least one nucleic acid sequence encoding at least one 5F9 5′ flanking region, at least one nucleic acid sequence encoding at least one L5 loop motif region, and at least one nucleic acid sequence encoding at least one 3F8 3′ flanking region.

[0667] In one embodiment, the molecular scaffold may comprise one or more linkers known in the art. The linkers may separate regions or one molecular scaffold from another. As a non-limiting example, the molecular scaffold may be polycistronic.

[0668] In one embodiment, the modulatory polynucleotide is designed using at least one of the following properties: loop variant, seed mismatch/bulge/wobble variant, stem mismatch, loop variant and vassal stem mismatch variant, seed mismatch and basal stem mismatch variant, stem mismatch and basal stem mismatch variant, seed wobble and basal stem wobble variant, or a stem sequence variant.

[0669] In one embodiment, the molecular scaffold may be located between the two ITRs of an expression vector. As a non-limiting example, the molecular scaffold may be inserted into an expression vector at at least one of six different locations as shown in FIG. 2. In FIG. 2, “ITR” is the inverted terminal repeat, “I” represents intron, “P” is the polyA and “MP” is the modulatory polynucleotide.

[0670] In one embodiment, the molecular scaffold may be located downstream of a promoter such as, but not limited to, CMV, U6, H1, CBA or a CBA promoter with a SV40 or a human betaGlobin intron. Further, the molecular scaffold may also be located upstream of the polyadenylation sequence. As a non-limiting example, the molecular scaffold may be located within 1, 2, 3, 4, 5, 6, 7, 8, 9, 10, 11, 12, 13, 14, 15, 16, 17, 18, 19, 20, 21, 22, 23, 24, 25, 26, 27, 28, 29, 30 or more than 30 nucleotides downstream from the promoter and/or upstream of the polyadenylation sequence. As another non-limiting example, the molecular scaffold may be located within 1-5, 1-10, 1-15, 1-20, 1-25, 1-30, 5-10, 5-15, 5-20, 5-25, 5-30, 10-15, 10-20, 10-25, 10-30, 15-20, 15-25, 15-30, 20-25, 20-30 or 25-30 nucleotides downstream from the promoter and/or upstream of the polyadenylation sequence. As a non-limiting example, the molecular scaffold may be located within the first 1%, 2%, 3%, 4%, 5%, 6%, 7%, 8%, 9%, 10%, 15%, 20%, 25% or more than 25% of the nucleotides downstream from the promoter and/or upstream of the polyadenylation sequence. As another non-limiting example, the molecular scaffold may be located with the first 1-5%, 1-10%, 1-15%, 1-20%, 1-25%, 5-10%, 5-15%, 5-20%, 5-25%, 10-15%, 10-20%, 10-25%, 15-20%, 15-25%, or 20-25% downstream from the promoter and/or upstream of the polyadenylation sequence.

[0671] In one embodiment, the molecular scaffold may be located upstream of the polyadenylation sequence. Further, the molecular scaffold may be located downstream of a promoter such as, but not limited to, CMV, U6, H1, CBA or a CBA promoter with a SV40 or a human betaGlobin intron. As a non-limiting example, the molecular scaffold may be located within 1, 2, 3, 4, 5, 6, 7, 8, 9, 10, 11, 12, 13, 14, 15, 16, 17, 18, 19, 20, 21, 22, 23, 24, 25, 26, 27, 28, 29, 30 or more than 30 nucleotides downstream from the promoter and/or upstream of the polyadenylation sequence. As another non-limiting example, the molecular scaffold may be located within 1-5, 1-10, 1-15, 1-20, 1-25, 1-30, 5-10, 5-15, 5-20, 5-25, 5-30, 10-15, 10-20, 10-25, 10-30, 15-20, 15-25, 15-30, 20-25, 20-30 or 25-30 nucleotides downstream from the promoter and/or upstream of the polyadenylation sequence. As a non-limiting example, the molecular scaffold may be located within the first 1%, 2%, 3%, 4%, 5%, 6%, 7%, 8%, 9%, 10%, 15%, 20%, 25% or more than 25% of the nucleotides downstream from the promoter and/or upstream of the polyadenylation sequence. As another non-limiting example, the molecular scaffold may be located with the first 1-5%, 1-10%, 1-15%, 1-20%, 1-25%, 5-10%, 5-15%, 5-20%, 5-25%, 10-15%, 10-20%, 10-25%, 15-20%, 15-25%, or 20-25% downstream from the promoter and/or upstream of the polyadenylation sequence.

[0672] In one embodiment, the molecular scaffold may be located in a scAAV.

[0673] In one embodiment, the molecular scaffold may be located in an ssAAV.

[0674] In one embodiment, the molecular scaffold may be located near the 5′ end of the flip ITR. In another embodiment, the molecular scaffold may be located near the 3′end of the flip ITR. In yet another embodiment, the molecular scaffold may be located near the 5′ end of the flop ITR. In yet another embodiment, the molecular scaffold may be located near the 3′ end of the flop ITR. In one embodiment, the molecular scaffold may be located between the 5′ end of the flip ITR and the 3′ end of the flop ITR. In one embodiment, the molecular scaffold may be located between (e.g., half-way between the 5′ end of the flip ITR and 3′ end of the flop ITR or the 3′ end of the flop ITR and the 5′ end of the flip ITR), the 3′ end of the flip ITR and the 5′ end of the flip ITR. As a non-limiting example, the molecular scaffold may be located within 1, 2, 3, 4, 5, 6, 7, 8, 9, 10, 11, 12, 13, 14, 15, 16, 17, 18, 19, 20, 21, 22, 23, 24, 25, 26, 27, 28, 29, 30 or more than 30 nucleotides downstream from the 5′ or 3′ end of an ITR (e.g., Flip or Flop ITR). As a non-limiting example, the molecular scaffold may be located within 1, 2, 3, 4, 5, 6, 7, 8, 9, 10, 11, 12, 13, 14, 15, 16, 17, 18, 19, 20, 21, 22, 23, 24, 25, 26, 27, 28, 29, 30 or more than 30 nucleotides upstream from the 5′ or 3′ end of an ITR (e.g., Flip or Flop ITR). As another non-limiting example, the molecular scaffold may be located within 1-5, 1-10, 1-15, 1-20, 1-25, 1-30, 5-10, 5-15, 5-20, 5-25, 5-30, 10-15, 10-20, 10-25, 10-30, 15-20, 15-25, 15-30, 20-25, 20-30 or 25-30 nucleotides downstream from the 5′ or 3′ end of an ITR (e.g., Flip or Flop ITR). As another non-limiting example, the molecular scaffold may be located within 1-5, 1-10, 1-15, 1-20, 1-25, 1-30, 5-10, 5-15, 5-20, 5-25, 5-30, 10-15, 10-20, 10-25, 10-30, 15-20, 15-25, 15-30, 20-25, 20-30 or 25-30 upstream from the 5′ or 3′ end of an ITR (e.g., Flip or Flop ITR). As a non-limiting example, the molecular scaffold may be located within the first 1%, 2%, 3%, 4%, 5%, 6%, 7%, 8%, 9%, 10%, 15%, 20%, 25% or more than 25% of the nucleotides upstream from the 5′ or 3′ end of an ITR (e.g., Flip or Flop ITR). As another non-limiting example, the molecular scaffold may be located with the first 1-5%, 1-10%, 1-15%, 1-20%, 1-25%, 5-10%, 5-15%, 5-20%, 5-25%, 10-15%, 10-20%, 10-25%, 15-20%, 15-25%, or 20-25% downstream from the 5′ or 3′ end of an ITR (e.g., Flip or Flop ITR).

### Vectors

[0675] In some embodiments, the siRNA molecules described herein can be encoded by vectors such as plasmids or viral vectors. In one embodiment, the siRNA molecules are encoded by viral vectors. Viral vectors may be, but are not limited to, Herpesvirus (HSV) vectors, retroviral vectors, adenoviral vectors, adeno-associated viral vectors, lentiviral vectors, and the like. In some specific embodiments, the viral vectors are AAV vectors.

### Retroviral Vectors

[0676] In some embodiments, the siRNA duplex targeting SOD1 or HTT may be encoded by a retroviral vector (See, e.g., U.S. Pat. Nos. 5,399,346; 5,124,263; 4,650,764 and 4,980,289; the content of each of which are incorporated herein by reference in their entirety).

### Adenoviral Vectors

[0677] Adenoviruses are eukaryotic DNA viruses that can be modified to efficiently deliver a nucleic acid to a variety of cell types in vivo, and have been used extensively in gene therapy protocols, including for targeting genes to neural cells. Various replication defective adenovirus and minimum adenovirus vectors have been described for nucleic acid therapeutics (See, e.g., PCT Patent Publication Nos. WO199426914, WO 199502697, WO199428152, WO199412649, WO199502697 and WO199622378; the content of each of which is incorporated by reference in their entirety). Such adenoviral vectors may also be used to deliver siRNA molecules of the present invention to cells.

### Adeno-Associated Viral (AAV) Vectors

[0678] An adeno-associated virus (AAV) is a dependent parvovirus (like other parvoviruses) which is a single stranded non-enveloped DNA virus having a genome of about 5000 nucleotides in length and which contains two open reading frames encoding the proteins responsible for replication (Rep) and the structural protein of the capsid (Cap). The open reading frames are flanked by two Inverted Terminal Repeat (ITR) sequences, which serve as the origin of replication of the viral genome. Furthermore, the AAV genome contains a packaging sequence, allowing packaging of the viral genome into an AAV capsid. The AAV vector requires a co-helper (e.g., adenovirus) to undergo productive infection in infected cells. In the absence of such helper functions, the AAV virions essentially enter host cells but do not integrate into the cells' genome.

[0679] AAV vectors have been investigated for siRNA delivery because of several unique features. Non-limiting examples of the features include (i) the ability to infect both dividing and non-dividing cells; (ii) a broad host range for infectivity, including human cells; (iii) wild-type AAV has not been associated with any disease and has not been shown to replicate in infected cells; (iv) the lack of cell-mediated immune response against the vector and (v) the non-integrative nature in a host chromosome thereby reducing potential for long-term genetic alterations. Moreover, infection with AAV vectors has minimal influence on changing the pattern of cellular gene expression (Stilwell and Samulski et al., Biotechniques, 2003, 34, 148).

[0680] Typically, AAV vectors for siRNA delivery may be recombinant viral vectors which are replication defective as they lack sequences encoding functional Rep and Cap proteins within the viral genome. In some cases, the defective AAV vectors may lack most or all coding sequences and essentially only contains one or two AAV ITR sequences and a packaging sequence.

[0681] In one embodiment, the AAV vectors comprising a nucleic acid sequence encoding the siRNA molecules of the present invention may be introduced into mammalian cells.

[0682] AAV vectors may be modified to enhance the efficiency of delivery. Such modified AAV vectors comprising the nucleic acid sequence encoding the siRNA molecules of the present invention can be packaged efficiently and can be used to successfully infect the target cells at high frequency and with minimal toxicity.

[0683] In some embodiments, the AAV vector comprising a nucleic acid sequence encoding the siRNA molecules of the present invention may be a human serotype AAV vector. Such human AAV vector may be derived from any known serotype, e.g., from any one of serotypes AAV1-AAV11. As non-limiting examples, AAV vectors may be vectors comprising an AAV1-derived genome in an AAV1-derived capsid; vectors comprising an AAV2-derived genome in an AAV2-derived capsid; vectors comprising an AAV4-derived genome in an AAV4 derived capsid; vectors comprising an AAV6-derived genome in an AAV6 derived capsid or vectors comprising an AAV9-derived genome in an AAV9 derived capsid.

[0684] In other embodiments, the AAV vector comprising a nucleic acid sequence for encoding siRNA molecules of the present invention may be a pseudotyped hybrid or chimeric AAV vector which contains sequences and/or components originating from at least two different AAV serotypes. Pseudotyped AAV vectors may be vectors comprising an AAV genome derived from one AAV serotype and a capsid protein derived at least in part from a different AAV serotype. As non-limiting examples, such pseudotyped AAV vectors may be vectors comprising an AAV2-derived genome in an AAV1-derived capsid; or vectors comprising an AAV2-derived genome in an AAV6-derived capsid; or vectors comprising an AAV2-derived genome in an AAV4-derived capsid; or an AAV2-derived genome in an AAV9-derived capsid. In like fashion, the present invention contemplates any hybrid or chimeric AAV vector.

[0685] In other embodiments, AAV vectors comprising a nucleic acid sequence encoding the siRNA molecules of the present invention may be used to deliver siRNA molecules to the central nervous system (e.g., U.S. Pat. No. 6,180,613; the contents of which is herein incorporated by reference in its entirety).

[0686] In some aspects, the AAV vectors comprising a nucleic acid sequence encoding the siRNA molecules of the present invention may further comprise a modified capsid including peptides from non-viral origin. In other aspects, the AAV vector may contain a CNS specific chimeric capsid to facilitate the delivery of encoded siRNA duplexes into the brain and the spinal cord. For example, an alignment of cap nucleotide sequences from AAV variants exhibiting CNS tropism may be constructed to identify variable region (VR) sequence and structure.

[0687] In one embodiment, the AAV vector comprising a nucleic acid sequence encoding the siRNA molecules of the present invention may encode siRNA molecules which are polycistronic molecules. The siRNA molecules may additionally comprise one or more linkers between regions of the siRNA molecules.

### Self-Complemtary and Single Strand Vectors

[0688] In one embodiment, the AAV vector used in the present invention is a single strand vector (ssAAV).

[0689] In another embodiment, the AAV vectors may be self-complementary AAV vectors (scAAVs). scAAV vectors contain both DNA strands which anneal together to form double stranded DNA. By skipping second strand synthesis, scAAVs allow for rapid expression in the cell.

[0690] In one embodiment, the AAV vector used in the present invention is a scAAV.

[0691] Methods for producing and/or modifying AAV vectors are disclosed in the art such as pseudotyped AAV vectors (International Patent Publication Nos. WO200028004; WO200123001; WO2004112727; WO 2005005610 and WO 2005072364, the content of each of which are incorporated herein by reference in their entirety).

### AAV Serotypes

[0692] AAV particles of the present invention may comprise or be derived from any natural or recombinant AAV serotype. According to the present invention, the AAV particles may utilize or be based on a serotype selected from any of the following AAV1, AAV2, AAV2G9, AAV3, AAV3a, AAV3b, AAV3-3, AAV4, AAV4-4, AAV5, AAV6, AAV6.1, AAV6.2, AAV6.1.2, AAV7, AAV7.2, AAV8, AAV9, AAV9.11, AAV9.13, AAV9.16, AAV9.24, AAV9.45, AAV9.47, AAV9.61, AAV9.68, AAV9.84, AAV9.9, AAV10, AAV11, AAV12, AAV16.3, AAV24.1, AAV27.3, AAV42.12, AAV42-1b, AAV42-2, AAV42-3a, AAV42-3b, AAV42-4, AAV42-5a, AAV42-5b, AAV42-6b, AAV42-8, AAV42-10, AAV42-11, AAV42-12, AAV42-13, AAV42-15, AAV42-aa, AAV43-1, AAV43-12, AAV43-20, AAV43-21, AAV43-23, AAV43-25, AAV43-5, AAV44.1, AAV44.2, AAV44.5, AAV223.1, AAV223.2, AAV223.4, AAV223.5, AAV223.6, AAV223.7, AAV1-7/rh.48, AAV1-8/rh.49, AAV2-15/rh.62, AAV2-3/rh.61, AAV2-4/rh.50, AAV2-5/rh.51, AAV3.1/hu.6, AAV3.1/hu.9, AAV3-9/rh.52, AAV3-11/rh.53, AAV4-8/r11.64, AAV4-9/rh.54, AAV4-19/rh.55, AAV5-3/rh.57, AAV5-22/rh.58, AAV7.3/hu.7, AAV16.8/hu.10, AAV16.12/hu.11, AAV29.3/bb.1, AAV29.5/bb.2, AAV106.1/hu.37, AAV114.3/hu.40, AAV127.2/hu.41, AAV127.5/hu.42, AAV128.3/hu.44, AAV130.4/hu.48, AAV145.1/hu.53, AAV145.5/hu.54, AAV145.6/hu.55, AAV161.10/hu.60, AAV161.6/hu.61, AAV33.12/hu.17, AAV33.4/hu.15, AAV33.8/hu.16, AAV52/hu.19, AAV52.1/hu.20, AAV58.2/hu.25, AAVA3.3, AAVA3.4, AAVA3.5, AAVA3.7, AAVC1, AAVC2, AAVC5, AAV-DJ, AAV-DJ8, AAVF3, AAVF5, AAVH2, AAVrh.72, AAVhu.8, AAVrh.68, AAVrh.70, AAVpi.1, AAVpi.3, AAVpi.2, AAVrh.60, AAVrh.44, AAVrh.65, AAVrh.55, AAVrh.47, AAVrh.69, AAVrh.45, AAVrh.59, AAVhu.12, AAVH6, AAVLK03, AAVH-1/hu.1, AAVH-5/hu.3, AAVLG-10/rh.40, AAVLG-4/rh.38, AAVLG-9/hu.39, AAVN721-8/rh.43, AAVCh.5, AAVCh.5R1, AAVcy.2, AAVcy.3, AAVcy.4, AAVcy.5, AAVCy.5R1, AAVCy.5R2, AAVCy.5R3, AAVCy.5R4, AAVcy.6, AAVhu.1, AAVhu.2, AAVhu.3, AAVhu.4, AAVhu.5, AAVhu.6, AAVhu.7, AAVhu.9, AAVhu.10, AAVhu.11, AAVhu.13, AAVhu.15, AAVhu.16, AAVhu.17, AAVhu.18, AAVhu.20, AAVhu.21, AAVhu.22, AAVhu.23.2, AAVhu.24, AAVhu.25, AAVhu.27, AAVhu.28, AAVhu.29, AAVhu.29R, AAVhu.31, AAVhu.32, AAVhu.34, AAVhu.35, AAVhu.37, AAVhu.39, AAVhu.40, AAVhu.41, AAVhu.42, AAVhu.43, AAVhu.44, AAVhu.44R1, AAVhu.44R2, AAVhu.44R3, AAVhu.45, AAVhu.46, AAVhu.47, AAVhu.48, AAVhu.48R1, AAVhu.48R2, AAVhu.48R3, AAVhu.49, AAVhu.51, AAVhu.52, AAVhu.54, AAVhu.55, AAVhu.56, AAVhu.57, AAVhu.58, AAVhu.60, AAVhu.61, AAVhu.63, AAVhu.64, AAVhu.66, AAVhu.67, AAVhu.14/9, AAVhu.t 19, AAVrh.2, AAVrh.2R, AAVrh.8, AAVrh.8R, AAVrh.10, AAVrh.12, AAVrh.13, AAVrh.13R, AAVrh.14, AAVrh.17, AAVrh.18, AAVrh.19, AAVrh.20, AAVrh.21, AAVrh.22, AAVrh.23, AAVrh.24, AAVrh.25, AAVrh.31, AAVrh.32, AAVrh.33, AAVrh.34, AAVrh.35, AAVrh.36, AAVrh.37, AAVrh.37R2, AAVrh.38, AAVrh.39, AAVrh.40, AAVrh.46, AAVrh.48, AAVrh.48.1, AAVrh.48.1.2, AAVrh.48.2, AAVrh.49, AAVrh.51, AAVrh.52, AAVrh.53, AAVrh.54, AAVrh.56, AAVrh.57, AAVrh.58, AAVrh.61, AAVrh.64, AAVrh.64R1, AAVrh.64R2, AAVrh.67, AAVrh.73, AAVrh.74, AAVrh8R, AAVrh8R A5 86R mutant, AAVrh8R R533A mutant, AAAV, BAAV, caprine AAV, bovine AAV, AAVhE1.1, AAVhEr1.5, AAVhER1.14, AAVhEr1.8, AAVhEr1.16, AAVhEr1.18, AAVhEr1.35, AAVhEr1.7, AAVhEr1.36, AAVhEr2.29, AAVhEr2.4, AAVhEr2.16, AAVhEr2.30, AAVhEr2.31, AAVhEr2.36, AAVhER1.23, AAVhEr3.1, AAV2.5T, AAV-PAEC, AAV-LK01, AAV-LK02, AAV-LK03, AAV-LK04, AAV-LK05, AAV-LK06, AAV-LK07, AAV-LK08, AAV-LK09, AAV-LK10, AAV-LK11, AAV-LK12, AAV-LK13, AAV-LK14, AAV-LK15, AAV-LK16, AAV-LK17, AAV-LK18, AAV-LK19, AAV-PAEC2, AAV-PAEC4, AAV-PAEC6, AAV-PAEC7, AAV-PAEC8, AAV-PAEC11, AAV-PAEC12, AAV-2-pre-miRNA-101, AAV-8h, AAV-8b, AAV-h, AAV-b, AAV SM 10-2, AAV Shuffle 100-1, AAV Shuffle 100-3, AAV Shuffle 100-7, AAV Shuffle 10-2, AAV Shuffle 10-6, AAV Shuffle 10-8, AAV Shuffle 100-2, AAV SM 10-1, AAV SM 10-8, AAV SM 100-3, AAV SM 100-10, BNP61 AAV, BNP62 AAV, BNP63 AAV, AAVrh.50, AAVrh.43, AAVrh.62, AAVrh.48, AAVhu.19, AAVhu.11, AAVhu.53, AAV4-8/rh.64, AAVLG-9/hu.39, AAV54.5/hu.23, AAV54.2/hu.22, AAV54.7/hu.24, AAV54.1/hu.21, AAV54.4R/hu.27, AAV46.2/hu.28, AAV46.6/hu.29, AAV128.1/hu.43, true type AAV (ttAAV), UPENN AAV 10, Japanese AAV 10 serotypes, AAV CBr-7.1, AAV CBr-7.10, AAV CBr-7.2, AAV CBr-7.3, AAV CBr-7.4, AAV CBr-7.5, AAV CBr-7.7, AAV CBr-7.8, AAV CBr-B7.3, AAV CBr-B7.4, AAV CBr-E1, AAV CBr-E2, AAV CBr-E3, AAV CBr-E4, AAV CBr-E5, AAV CBr-e5, AAV CBr-E6, AAV CBr-E7, AAV CBr-E8, AAV CHt-1, AAV CHt-2, AAV CHt-3, AAV CHt-6.1, AAV CHt-6.10, AAV CHt-6.5, AAV CHt-6.6, AAV CHt-6.7, AAV CHt-6.8, AAV CHt-P1, AAV CHt-P2, AAV CHt-P5, AAV CHt-P6, AAV CHt-P8, AAV CHt-P9, AAV CKd-1, AAV CKd-10, AAV CKd-2, AAV CKd-3, AAV CKd-4, AAV CKd-6, AAV CKd-7, AAV CKd-8, AAV CKd-B1, AAV CKd-B2, AAV CKd-B3, AAV CKd-B4, AAV CKd-B5, AAV CKd-B6, AAV CKd-B7, AAV CKd-B8, AAV CKd-H1, AAV CKd-H2, AAV CKd-H3, AAV CKd-H4, AAV CKd-H5, AAV CKd-H6, AAV CKd-N3, AAV CKd-N4, AAV CKd-N9, AAV CLg-F1, AAV CLg-F2, AAV CLg-F3, AAV CLg-F4, AAV CLg-F5, AAV CLg-F6, AAV CLg-F7, AAV CLg-F8, AAV CLv-1, AAV CLv1-1, AAV Clv1-10, AAV CLv1-2, AAV CLv-12, AAV CLv1-3, AAV CLv-13, AAV CLv1-4, AAV Clv1-7, AAV Clv1-8, AAV Clv1-9, AAV CLv-2, AAV CLv-3, AAV CLv-4, AAV CLv-6, AAV CLv-8, AAV CLv-D1, AAV CLv-D2, AAV CLv-D3, AAV CLv-D4, AAV CLv-D5, AAV CLv-D6, AAV CLv-D7, AAV CLv-D8, AAV CLv-E1, AAV CLv-K1, AAV CLv-K3, AAV CLv-K6, AAV CLv-L4, AAV CLv-L5, AAV CLv-L6, AAV CLv-M1, AAV CLv-M11, AAV CLv-M2, AAV CLv-M5, AAV CLv-M6, AAV CLv-M7, AAV CLv-M8, AAV CLv-M9, AAV CLv-R1, AAV CLv-R2, AAV CLv-R3, AAV CLv-R4, AAV CLv-R5, AAV CLv-R6, AAV CLv-R7, AAV CLv-R8, AAV CLv-R9, AAV CSp-1, AAV CSp-10, AAV CSp-11, AAV CSp-2, AAV CSp-3, AAV CSp-4, AAV CSp-6, AAV CSp-7, AAV CSp-8, AAV CSp-8.10, AAV CSp-8.2, AAV CSp-8.4, AAV CSp-8.5, AAV CSp-8.6, AAV CSp-8.7, AAV CSp-8.8, AAV CSp-8.9, AAV CSp-9, AAV.hu.48R3, AAV.VR-355, AAV3B, AAV4, AAV5, AAVF1/HSC1, AAVF11/HSC11, AAVF12/HSC12, AAVF13/HSC13, AAVF14/HSC14, AAVF15/HSC15, AAVF16/HSC16, AAVF17/HSC17, AAVF2/HSC2, AAVF3/HSC3, AAVF4/HSC4, AAVF5/HSC5, AAVF6/HSC6, AAVF7/HSC7, AAVF8/HSC8, AAVF9/HSC9, AAV-PHP.B (PHP.B), AAV-PHP.A (PHP.A), G2B-26, G2B-13, TH1.1-32 and/or TH1.1-35, and variants thereof. As a non-limiting example, the capsid of the recombinant AAV virus is AAV2. As a non-limiting example, the capsid of the recombinant AAV virus is AAVrh10. As a non-limiting example, the capsid of the recombinant AAV virus is AAV9(hu14). As a non-limiting example, the capsid of the recombinant AAV virus is AAV-DJ. As a non-limiting example, the capsid of the recombinant AAV virus is AAV9.47. As a non-limiting example, the capsid of the recombinant AAV virus is AAV-DJ8. As a non-limiting example, the capsid of the recombinant AAV virus is AAV-PHP.B. As a non-limiting example, the capsid of the recombinant AAV virus is AAV-PHP.A.

[0693] In some embodiments, the AAV serotype may be, or have, a sequence as described in United States Publication No. US20030138772, the contents of which are herein incorporated by reference in their entirety, such as, but not limited to, AAV1 (SEQ ID NO: 6 and 64 of US20030138772), AAV2 (SEQ ID NO: 7 and 70 of US20030138772), AAV3 (SEQ ID NO: 8 and 71 of US20030138772), AAV4 (SEQ ID NO: 63 of US20030138772), AAV5 (SEQ ID NO: 114 of US20030138772), AAV6 (SEQ ID NO: 65 of US20030138772), AAV7 (SEQ ID NO: 1-3 of US20030138772), AAV8 (SEQ ID NO: 4 and 95 of US20030138772), AAV9 (SEQ ID NO: 5 and 100 of US20030138772), AAV10 (SEQ ID NO: 117 of US20030138772), AAV11 (SEQ ID NO: 118 of US20030138772), AAV12 (SEQ ID NO: 119 of US20030138772), AAVrh10 (amino acids 1 to 738 of SEQ ID NO: 81 of US20030138772), AAV16.3 (US20030138772 SEQ ID NO: 10), AAV29.3/bb.1 (US20030138772 SEQ ID NO: 11), AAV29.4 (US20030138772 SEQ ID NO: 12), AAV29.5/bb.2 (US20030138772 SEQ ID NO: 13), AAV1.3 (US20030138772 SEQ ID NO: 14), AAV13.3 (US20030138772 SEQ ID NO: 15), AAV24.1 (US20030138772 SEQ ID NO: 16), AAV27.3 (US20030138772 SEQ ID NO: 17), AAV7.2 (US20030138772 SEQ ID NO: 18), AAVC1 (US20030138772 SEQ ID NO: 19), AAVC3 (US20030138772 SEQ ID NO: 20), AAVC5 (US20030138772 SEQ ID NO: 21), AAVF1 (US20030138772 SEQ ID NO: 22), AAVF3 (US20030138772 SEQ ID NO: 23), AAVF5 (US20030138772 SEQ ID NO: 24), AAVH6 (US20030138772 SEQ ID NO: 25), AAVH2 (US20030138772 SEQ ID NO: 26), AAV42-8 (US20030138772 SEQ ID NO: 27), AAV42-15 (US20030138772 SEQ ID NO: 28), AAV42-5b (US20030138772 SEQ ID NO: 29), AAV42-1b (US20030138772 SEQ ID NO: 30), AAV42-13 (US20030138772 SEQ ID NO: 31), AAV42-3a (US20030138772 SEQ ID NO: 32), AAV42-4 (US20030138772 SEQ ID NO: 33), AAV42-5a (US20030138772 SEQ ID NO: 34), AAV42-10 (US20030138772 SEQ ID NO: 35), AAV42-3b (US20030138772 SEQ ID NO: 36), AAV42-11 (US20030138772 SEQ ID NO: 37), AAV42-6b (US20030138772 SEQ ID NO: 38), AAV43-1 (US20030138772 SEQ ID NO: 39), AAV43-5 (US20030138772 SEQ ID NO: 40), AAV43-12 (US20030138772 SEQ ID NO: 41), AAV43-20 (US20030138772 SEQ ID NO: 42), AAV43-21 (US20030138772 SEQ ID NO: 43), AAV43-23 (US20030138772 SEQ ID NO: 44), AAV43-25 (US20030138772 SEQ ID NO: 45), AAV44.1 (US20030138772 SEQ ID NO: 46), AAV44.5 (US20030138772 SEQ ID NO: 47), AAV223.1 (US20030138772 SEQ ID NO: 48), AAV223.2 (US20030138772 SEQ ID NO: 49), AAV223.4 (US20030138772 SEQ ID NO: 50), AAV223.5 (US20030138772 SEQ ID NO: 51), AAV223.6 (US20030138772 SEQ ID NO: 52), AAV223.7 (US20030138772 SEQ ID NO: 53), AAVA3.4 (US20030138772 SEQ ID NO: 54), AAVA3.5 (US20030138772 SEQ ID NO: 55), AAVA3.7 (US20030138772 SEQ ID NO: 56), AAVA3.3 (US20030138772 SEQ ID NO: 57), AAV42.12 (US20030138772 SEQ ID NO: 58), AAV44.2 (US20030138772 SEQ ID NO: 59), AAV42-2 (US20030138772 SEQ ID NO: 9), or variants thereof.

[0694] In some embodiments, the AAV serotype may be, or have, a sequence as described in United States Publication No. US20150159173, the contents of which are herein incorporated by reference in their entirety, such as, but not limited to, AAV2 (SEQ ID NO: 7 and 23 of US20150159173), rh20 (SEQ ID NO: 1 of US20150159173), rh32/33 (SEQ ID NO: 2 of US20150159173), rh39 (SEQ ID NO: 3, 20 and 36 of US20150159173), rh46 (SEQ ID NO: 4 and 22 of US20150159173), rh73 (SEQ ID NO: 5 of US20150159173), rh74 (SEQ ID NO: 6 of US20150159173), AAV6.1 (SEQ ID NO: 29 of US20150159173), rh.8 (SEQ ID NO: 41 of US20150159173), rh.48.1 (SEQ ID NO: 44 of US20150159173), hu.44 (SEQ ID NO: 45 of US20150159173), hu.29 (SEQ ID NO: 42 of US20150159173), hu.48 (SEQ ID NO: 38 of US20150159173), rh54 (SEQ ID NO: 49 of US20150159173), AAV2 (SEQ ID NO: 7 of US20150159173), cy.5 (SEQ ID NO: 8 and 24 of US20150159173), rh.10 (SEQ ID NO: 9 and 25 of US20150159173), rh.13 (SEQ ID NO: 10 and 26 of US20150159173), AAV1 (SEQ ID NO: 11 and 27 of US20150159173), AAV3 (SEQ ID NO: 12 and 28 of US20150159173), AAV6 (SEQ ID NO: 13 and 29 of US20150159173), AAV7 (SEQ ID NO: 14 and 30 of US20150159173), AAV8 (SEQ ID NO: 15 and 31 of US20150159173), hu.13 (SEQ ID NO: 16 and 32 of US20150159173), hu.26 (SEQ ID NO: 17 and 33 of US20150159173), hu.37 (SEQ ID NO: 18 and 34 of US20150159173), hu.53 (SEQ ID NO: 19 and 35 of US20150159173), rh.43 (SEQ ID NO: 21 and 37 of US20150159173), rh2 (SEQ ID NO: 39 of US20150159173), rh.37 (SEQ ID NO: 40 of US20150159173), rh.64 (SEQ ID NO: 43 of US20150159173), rh.48 (SEQ ID NO: 44 of US20150159173), ch.5 (SEQ ID NO 46 of US20150159173), rh.67 (SEQ ID NO: 47 of US20150159173), rh.58 (SEQ ID NO: 48 of US20150159173), or variants thereof including, but not limited to Cy5R1, Cy5R2, Cy5R3, Cy5R4, rh.13R, rh.37R2, rh.2R, rh.8R, rh.48.1, rh.48.2, rh.48.1.2, hu.44R1, hu.44R2, hu.44R3, hu.29R, ch.5R1, rh64R1, rh64R2, AAV6.2, AAV6.1, AAV6.12, hu.48R1, hu.48R2, and hu.48R3.

[0695] In some embodiments, the AAV serotype may be, or have, a sequence as described in U.S. Pat. No. 7,198,951, the contents of which are herein incorporated by reference in their entirety, such as, but not limited to, AAV9 (SEQ ID NO: 1-3 of U.S. Pat. No. 7,198,951), AAV2 (SEQ ID NO: 4 of U.S. Pat. No. 7,198,951), AAV1 (SEQ ID NO: 5 of U.S. Pat. No. 7,198,951), AAV3 (SEQ ID NO: 6 of U.S. Pat. No. 7,198,951), and AAV8 (SEQ ID NO: 7 of U.S. Pat. No. 7,198,951).

[0696] In some embodiments, the AAV serotype may be, or have, a mutation in the AAV9 sequence as described by N Pulicherla et al. (Molecular Therapy 19(6):1070-1078 (2011), herein incorporated by reference in its entirety), such as but not limited to, AAV9.9, AAV9.11, AAV9.13, AAV9.16, AAV9.24, AAV9.45, AAV9.47, AAV9.61, AAV9.68, AAV9.84.

[0697] In some embodiments, the AAV serotype may be, or have, a sequence as described in U.S. Pat. No. 6,156,303, the contents of which are herein incorporated by reference in their entirety, such as, but not limited to, AAV3B (SEQ ID NO: 1 and 10 of U.S. Pat. No. 6,156,303), AAV6 (SEQ ID NO: 2, 7 and 11 of U.S. Pat. No. 6,156,303), AAV2 (SEQ ID NO: 3 and 8 of U.S. Pat. No. 6,156,303), AAV3A (SEQ ID NO: 4 and 9, of U.S. Pat. No. 6,156,303), or derivatives thereof.

[0698] In some embodiments, the AAV serotype may be, or have, a sequence as described in United States Publication No. US20140359799, the contents of which are herein incorporated by reference in their entirety, such as, but not limited to, AAV8 (SEQ ID NO: 1 of US20140359799), AAVDJ (SEQ ID NO: 2 and 3 of US20140359799), or variants thereof.

[0699] In some embodiments, the serotype may be AAVDJ or a variant thereof, such as AAVDJ8 (or AAV-DJ8), as described by Grimm et al. (Journal of Virology 82(12): 5887-5911 (2008), herein incorporated by reference in its entirety). The amino acid sequence of AAVDJ8 may comprise two or more mutations in order to remove the heparin binding domain (HBD). As a non-limiting example, the AAV-DJ sequence described as SEQ ID NO: 1 in U.S. Pat. No. 7,588,772, the contents of which are herein incorporated by reference in their entirety, may comprise two mutations: (1) R587Q where arginine (R; Arg) at amino acid 587 is changed to glutamine (Q; Gln) and (2) R590T where arginine (R; Arg) at amino acid 590 is changed to threonine (T; Thr). As another non-limiting example, may comprise three mutations: (1) K406R where lysine (K; Lys) at amino acid 406 is changed to arginine (R; Arg), (2) R587Q where arginine (R; Arg) at amino acid 587 is changed to glutamine (Q; Gln) and (3) R590T where arginine (R; Arg) at amino acid 590 is changed to threonine (T; Thr).

[0700] In some embodiments, the AAV serotype may be, or have, a sequence of AAV4 as described in International Publication No. WO1998011244, the contents of which are herein incorporated by reference in their entirety, such as, but not limited to AAV4 (SEQ ID NO: 1-20 of WO1998011244).

[0701] In some embodiments, the AAV serotype may be, or have, a mutation in the AAV2 sequence to generate AAV2G9 as described in International Publication No. WO2014144229 and herein incorporated by reference in its entirety.

[0702] In some embodiments, the AAV serotype may be, or have, a sequence as described in International Publication No. WO2005033321, the contents of which are herein incorporated by reference in their entirety, such as, but not limited to AAV3-3 (SEQ ID NO: 217 of WO2005033321), AAV1 (SEQ ID NO: 219 and 202 of WO2005033321), AAV106.1/hu.37 (SEQ ID No: 10 of WO2005033321), AAV114.3/hu.40 (SEQ ID No: 11 of WO2005033321), AAV127.2/hu.41 (SEQ ID NO:6 and 8 of WO2005033321), AAV128.3/hu.44 (SEQ ID No: 81 of WO2005033321), AAV130.4/hu.48 (SEQ ID NO: 78 of WO2005033321), AAV145.1/hu.53 (SEQ ID No: 176 and 177 of WO2005033321), AAV145.6/hu.56 (SEQ ID NO: 168 and 192 of WO2005033321), AAV16.12/hu.11 (SEQ ID NO: 153 and 57 of WO2005033321), AAV16.8/hu.10 (SEQ ID NO: 156 and 56 of WO2005033321), AAV161.10/hu.60 (SEQ ID No: 170 of WO2005033321), AAV161.6/hu.61 (SEQ ID No: 174 of WO2005033321), AAV1-7/rh.48 (SEQ ID NO: 32 of WO2005033321), AAV1-8/rh.49 (SEQ ID NOs: 103 and 25 of WO2005033321), AAV2 (SEQ ID NO: 211 and 221 of WO2005033321), AAV2-15/rh.62 (SEQ ID No: 33 and 114 of WO2005033321), AAV2-3/rh.61 (SEQ ID NO: 21 of WO2005033321), AAV2-4/rh.50 (SEQ ID No: 23 and 108 of WO2005033321), AAV2-5/rh.51 (SEQ ID NO: 104 and 22 of WO2005033321), AAV3.1/hu.6 (SEQ ID NO: 5 and 84 of WO2005033321), AAV3.1/hu.9 (SEQ ID NO: 155 and 58 of WO2005033321), AAV3-11/rh.53 (SEQ ID NO: 186 and 176 of WO2005033321), AAV3-3 (SEQ ID NO: 200 of WO2005033321), AAV33.12/hu.17 (SEQ ID NO:4 of WO2005033321), AAV33.4/hu.15 (SEQ ID No: 50 of WO2005033321), AAV33.8/hu.16 (SEQ ID No: 51 of WO2005033321), AAV3-9/rh.52 (SEQ ID NO: 96 and 18 of WO2005033321), AAV4-19/rh.55 (SEQ ID NO: 117 of WO2005033321), AAV4-4 (SEQ ID NO: 201 and 218 of WO2005033321), AAV4-9/rh.54 (SEQ ID NO: 116 of WO2005033321), AAV5 (SEQ ID NO: 199 and 216 of WO2005033321), AAV52.1/hu.20 (SEQ ID NO: 63 of WO2005033321), AAV52/hu.19 (SEQ ID NO: 133 of WO2005033321), AAV5-22/rh.58 (SEQ ID No: 27 of WO2005033321), AAV5-3/rh.57 (SEQ ID NO: 105 of WO2005033321), AAV5-3/rh.57 (SEQ ID No: 26 of WO2005033321), AAV58.2/hu.25 (SEQ ID No: 49 of WO2005033321), AAV6 (SEQ ID NO: 203 and 220 of WO2005033321), AAV7 (SEQ ID NO: 222 and 213 of WO2005033321), AAV7.3/hu.7 (SEQ ID No: 55 of WO2005033321), AAV8 (SEQ ID NO: 223 and 214 of WO2005033321), AAVH-1/hu.1 (SEQ ID No: 46 of WO2005033321), AAVH-5/hu.3 (SEQ ID No: 44 of WO2005033321), AAVhu.1 (SEQ ID NO: 144 of WO2005033321), AAVhu.10 (SEQ ID NO: 156 of WO2005033321), AAVhu.11 (SEQ ID NO: 153 of WO2005033321), AAVhu.12 (WO2005033321 SEQ ID NO: 59), AAVhu.13 (SEQ ID NO: 129 of WO2005033321), AAVhu.14/AAV9 (SEQ ID NO: 123 and 3 of WO2005033321), AAVhu.15 (SEQ ID NO: 147 of WO2005033321), AAVhu.16 (SEQ ID NO: 148 of WO2005033321), AAVhu.17 (SEQ ID NO: 83 of WO2005033321), AAVhu.18 (SEQ ID NO: 149 of WO2005033321), AAVhu.19 (SEQ ID NO: 133 of WO2005033321), AAVhu.2 (SEQ ID NO: 143 of WO2005033321), AAVhu.20 (SEQ ID NO: 134 of WO2005033321), AAVhu.21 (SEQ ID NO: 135 of WO2005033321), AAVhu.22 (SEQ ID NO: 138 of WO2005033321), AAVhu.23.2 (SEQ ID NO: 137 of WO2005033321), AAVhu.24 (SEQ ID NO: 136 of WO2005033321), AAVhu.25 (SEQ ID NO: 146 of WO2005033321), AAVhu.27 (SEQ ID NO: 140 of WO2005033321), AAVhu.29 (SEQ ID NO: 132 of WO2005033321), AAVhu.3 (SEQ ID NO: 145 of WO2005033321), AAVhu.31 (SEQ ID NO: 121 of WO2005033321), AAVhu.32 (SEQ ID NO: 122 of WO2005033321), AAVhu.34 (SEQ ID NO: 125 of WO2005033321), AAVhu.35 (SEQ ID NO: 164 of WO2005033321), AAVhu.37 (SEQ ID NO: 88 of WO2005033321), AAVhu.39 (SEQ ID NO: 102 of WO2005033321), AAVhu.4 (SEQ ID NO: 141 of WO2005033321), AAVhu.40 (SEQ ID NO: 87 of WO2005033321), AAVhu.41 (SEQ ID NO: 91 of WO2005033321), AAVhu.42 (SEQ ID NO: 85 of WO2005033321), AAVhu.43 (SEQ ID NO: 160 of WO2005033321), AAVhu.44 (SEQ ID NO: 144 of WO2005033321), AAVhu.45 (SEQ ID NO: 127 of WO2005033321), AAVhu.46 (SEQ ID NO: 159 of WO2005033321), AAVhu.47 (SEQ ID NO: 128 of WO2005033321), AAVhu.48 (SEQ ID NO: 157 of WO2005033321), AAVhu.49 (SEQ ID NO: 189 of WO2005033321), AAVhu.51 (SEQ ID NO: 190 of WO2005033321), AAVhu.52 (SEQ ID NO: 191 of WO2005033321), AAVhu.53 (SEQ ID NO: 186 of WO2005033321), AAVhu.54 (SEQ ID NO: 188 of WO2005033321), AAVhu.55 (SEQ ID NO: 187 of WO2005033321), AAVhu.56 (SEQ ID NO: 192 of WO2005033321), AAVhu.57 (SEQ ID NO: 193 of WO2005033321), AAVhu.58 (SEQ ID NO: 194 of WO2005033321), AAVhu.6 (SEQ ID NO: 84 of WO2005033321), AAVhu.60 (SEQ ID NO: 184 of WO2005033321), AAVhu.61 (SEQ ID NO: 185 of WO2005033321), AAVhu.63 (SEQ ID NO: 195 of WO2005033321), AAVhu.64 (SEQ ID NO: 196 of WO2005033321), AAVhu.66 (SEQ ID NO: 197 of WO2005033321), AAVhu.67 (SEQ ID NO: 198 of WO2005033321), AAVhu.7 (SEQ ID NO: 150 of WO2005033321), AAVhu.8 (WO2005033321 SEQ ID NO: 12), AAVhu.9 (SEQ ID NO: 155 of WO2005033321), AAVLG-10/rh.40 (SEQ ID No: 14 of WO2005033321), AAVLG-4/rh.38 (SEQ ID NO: 86 of WO2005033321), AAVLG-4/rh.38 (SEQ ID No: 7 of WO2005033321), AAVN721-8/rh.43 (SEQ ID NO: 163 of WO2005033321), AAVN721-8/rh.43 (SEQ ID No: 43 of WO2005033321), AAVpi.1 (WO2005033321 SEQ ID NO: 28), AAVpi.2 (WO2005033321 SEQ ID NO: 30), AAVpi.3 (WO2005033321 SEQ ID NO: 29), AAVrh.38 (SEQ ID NO: 86 of WO2005033321), AAVrh.40 (SEQ ID NO: 92 of WO2005033321), AAVrh.43 (SEQ ID NO: 163 of WO2005033321), AAVrh.44 (WO2005033321 SEQ ID NO: 34), AAVrh.45 (WO2005033321 SEQ ID NO: 41), AAVrh.47 (WO2005033321 SEQ ID NO: 38), AAVrh.48 (SEQ ID NO: 115 of WO2005033321), AAVrh.49 (SEQ ID NO: 103 of WO2005033321), AAVrh.50 (SEQ ID NO: 108 of WO2005033321), AAVrh.51 (SEQ ID NO: 104 of WO2005033321), AAVrh.52 (SEQ ID NO: 96 of WO2005033321), AAVrh.53 (SEQ ID NO: 97 of WO2005033321), AAVrh.55 (WO2005033321 SEQ ID NO: 37), AAVrh.56 (SEQ ID NO: 152 of WO2005033321), AAVrh.57 (SEQ ID NO: 105 of WO2005033321), AAVrh.58 (SEQ ID NO: 106 of WO2005033321), AAVrh.59 (WO2005033321 SEQ ID NO: 42), AAVrh.60 (WO2005033321 SEQ ID NO: 31), AAVrh.61 (SEQ ID NO: 107 of WO2005033321), AAVrh.62 (SEQ ID NO: 114 of WO2005033321), AAVrh.64 (SEQ ID NO: 99 of WO2005033321), AAVrh.65 (WO2005033321 SEQ ID NO: 35), AAVrh.68 (WO2005033321 SEQ ID NO: 16), AAVrh.69 (WO2005033321 SEQ ID NO: 39), AAVrh.70 (WO2005033321 SEQ ID NO: 20), AAVrh.72 (WO2005033321 SEQ ID NO: 9), or variants thereof including, but not limited to, AAVcy.2, AAVcy.3, AAVcy.4, AAVcy.5, AAVcy.6, AAVrh.12, AAVrh.17, AAVrh.18, AAVrh.19, AAVrh.21, AAVrh.22, AAVrh.23, AAVrh.24, AAVrh.25, AAVrh.25/42 15, AAVrh.31, AAVrh.32, AAVrh.33, AAVrh.34, AAVrh.35, AAVrh.36, AAVrh.37, AAVrh14. Non limiting examples of variants include SEQ ID NO: 13, 15, 17, 19, 24, 36, 40, 45, 47, 48, 51-54, 60-62, 64-77, 79, 80, 82, 89, 90, 93-95, 98, 100, 101, 109-113, 118-120, 124, 126, 131, 139, 142, 151,154, 158, 161, 162, 165-183, 202, 204-212, 215, 219, 224-236, of WO2005033321, the contents of which are herein incorporated by reference in their entirety.

[0703] In some embodiments, the AAV serotype may be, or have, a sequence as described in International Publication No. WO2015168666, the contents of which are herein incorporated by reference in their entirety, such as, but not limited to, AAVrh8R (SEQ ID NO: 9 of WO2015168666), AAVrh8R A586R mutant (SEQ ID NO: 10 of WO2015168666), AAVrh8R R533A mutant (SEQ ID NO: 11 of WO2015168666), or variants thereof.

[0704] In some embodiments, the AAV serotype may be, or have, a sequence as described in U.S. Pat. No. 9,233,131, the contents of which are herein incorporated by reference in their entirety, such as, but not limited to, AAVhE1.1 (SEQ ID NO:44 of U.S. Pat. No. 9,233,131), AAVhEr1.5 (SEQ ID NO:45 of U.S. Pat. No. 9,233,131), AAVhER1.14 (SEQ ID NO:46 of U.S. Pat. No. 9,233,131), AAVhEr1.8 (SEQ ID NO:47 of U.S. Pat. No. 9,233,131), AAVhEr1.16 (SEQ ID NO:48 of U.S. Pat. No. 9,233,131), AAVhEr1.18 (SEQ ID NO:49 of U.S. Pat. No. 9,233,131), AAVhEr1.35 (SEQ ID NO:50 of U.S. Pat. No. 9,233,131), AAVhEr1.7 (SEQ ID NO:51 of U.S. Pat. No. 9,233,131), AAVhEr1.36 (SEQ ID NO:52 of U.S. Pat. No. 9,233,131), AAVhEr2.29 (SEQ ID NO:53 of U.S. Pat. No. 9,233,131), AAVhEr2.4 (SEQ ID NO:54 of U.S. Pat. No. 9,233,131), AAVhEr2.16 (SEQ ID NO:55 of U.S. Pat. No. 9,233,131), AAVhEr2.30 (SEQ ID NO:56 of U.S. Pat. No. 9,233,131), AAVhEr2.31 (SEQ ID NO:58 of U.S. Pat. No. 9,233,131), AAVhEr2.36 (SEQ ID NO:57 of U.S. Pat. No. 9,233,131), AAVhER1.23 (SEQ ID NO:53 of U.S. Pat. No. 9,233,131), AAVhEr3.1 (SEQ ID NO:59 of U.S. Pat. No. 9,233,131), AAV2.5T (SEQ ID NO:42 of U.S. Pat. No. 9,233,131), or variants thereof.

[0705] In some embodiments, the AAV serotype may be, or have, a sequence as described in United States Patent Publication No. US20150376607, the contents of which are herein incorporated by reference in their entirety, such as, but not limited to, AAV-PAEC (SEQ ID NO:1 of US20150376607), AAV-LK01 (SEQ ID NO:2 of US20150376607), AAV-LK02 (SEQ ID NO:3 of US20150376607), AAV-LK03 (SEQ ID NO:4 of US20150376607), AAV-LK04 (SEQ ID NO:5 of US20150376607), AAV-LK05 (SEQ ID NO:6 of US20150376607), AAV-LK06 (SEQ ID NO:7 of US20150376607), AAV-LK07 (SEQ ID NO:8 of US20150376607), AAV-LK08 (SEQ ID NO:9 of US20150376607), AAV-LK09 (SEQ ID NO:10 of US20150376607), AAV-LK10 (SEQ ID NO:11 of US20150376607), AAV-LK11 (SEQ ID NO:12 of US20150376607), AAV-LK12 (SEQ ID NO:13 of US20150376607), AAV-LK13 (SEQ ID NO:14 of US20150376607), AAV-LK14 (SEQ ID NO:15 of US20150376607), AAV-LK15 (SEQ ID NO:16 of US20150376607), AAV-LK16 (SEQ ID NO:17 of US20150376607), AAV-LK17 (SEQ ID NO:18 of US20150376607), AAV-LK18 (SEQ ID NO:19 of US20150376607), AAV-LK19 (SEQ ID NO:20 of US20150376607), AAV-PAEC2 (SEQ ID NO:21 of US20150376607), AAV-PAEC4 (SEQ ID NO:22 of US20150376607), AAV-PAEC6 (SEQ ID NO:23 of US20150376607), AAV-PAEC7 (SEQ ID NO:24 of US20150376607), AAV-PAEC8 (SEQ ID NO:25 of US20150376607), AAV-PAEC11 (SEQ ID NO:26 of US20150376607), AAV-PAEC12 (SEQ ID NO:27, of US20150376607), or variants thereof.

[0706] In some embodiments, the AAV serotype may be, or have, a sequence as described in U.S. Pat. No. 9,163,261, the contents of which are herein incorporated by reference in their entirety, such as, but not limited to, AAV-2-pre-miRNA-101 (SEQ ID NO: 1 U.S. Pat. No. 9,163,261), or variants thereof.

[0707] In some embodiments, the AAV serotype may be, or have, a sequence as described in United States Patent Publication No. US20150376240, the contents of which are herein incorporated by reference in their entirety, such as, but not limited to, AAV-8h (SEQ ID NO: 6 of US20150376240), AAV-8b (SEQ ID NO: 5 of US20150376240), AAV-h (SEQ ID NO: 2 of US20150376240), AAV-b (SEQ ID NO: 1 of US20150376240), or variants thereof.

[0708] In some embodiments, the AAV serotype may be, or have, a sequence as described in United States Patent Publication No. US20160017295, the contents of which are herein incorporated by reference in their entirety, such as, but not limited to, AAV SM 10-2 (SEQ ID NO: 22 of US20160017295), AAV Shuffle 100-1 (SEQ ID NO: 23 of US20160017295), AAV Shuffle 100-3 (SEQ ID NO: 24 of US20160017295), AAV Shuffle 100-7 (SEQ ID NO: 25 of US20160017295), AAV Shuffle 10-2 (SEQ ID NO: 34 of US20160017295), AAV Shuffle 10-6 (SEQ ID NO: 35 of US20160017295), AAV Shuffle 10-8 (SEQ ID NO: 36 of US20160017295), AAV Shuffle 100-2 (SEQ ID NO: 37 of US20160017295), AAV SM 10-1 (SEQ ID NO: 38 of US20160017295), AAV SM 10-8 (SEQ ID NO: 39 of US20160017295), AAV SM 100-3 (SEQ ID NO: 40 of US20160017295), AAV SM 100-10 (SEQ ID NO: 41 of US20160017295), or variants thereof.

[0709] In some embodiments, the AAV serotype may be, or have, a sequence as described in United States Patent Publication No. US20150238550, the contents of which are herein incorporated by reference in their entirety, such as, but not limited to, BNP61 AAV (SEQ ID NO: 1 of US20150238550), BNP62 AAV (SEQ ID NO: 3 of US20150238550), BNP63 AAV (SEQ ID NO: 4 of US20150238550), or variants thereof.

[0710] In some embodiments, the AAV serotype may be or may have a sequence as described in United States Patent Publication No. US20150315612, the contents of which are herein incorporated by reference in their entirety, such as, but not limited to, AAVrh.50 (SEQ ID NO: 108 of US20150315612), AAVrh.43 (SEQ ID NO: 163 of US20150315612), AAVrh.62 (SEQ ID NO: 114 of US20150315612), AAVrh.48 (SEQ ID NO: 115 of US20150315612), AAVhu.19 (SEQ ID NO: 133 of US20150315612), AAVhu.11 (SEQ ID NO: 153 of US20150315612), AAVhu.53 (SEQ ID NO: 186 of US20150315612), AAV4-8/rh.64 (SEQ ID No: 15 of US20150315612), AAVLG-9/hu.39 (SEQ ID No: 24 of US20150315612), AAV54.5/hu.23 (SEQ ID No: 60 of US20150315612), AAV54.2/hu.22 (SEQ ID No: 67 of US20150315612), AAV54.7/hu.24 (SEQ ID No: 66 of US20150315612), AAV54.1/hu.21 (SEQ ID No: 65 of US20150315612), AAV54.4R/hu.27 (SEQ ID No: 64 of US20150315612), AAV46.2/hu.28 (SEQ ID No: 68 of US20150315612), AAV46.6/hu.29 (SEQ ID No: 69 of US20150315612), AAV128.1/hu.43 (SEQ ID No: 80 of US20150315612), or variants thereof.

[0711] In some embodiments, the AAV serotype may be, or have, a sequence as described in International Publication No. WO2015121501, the contents of which are herein incorporated by reference in their entirety, such as, but not limited to, true type AAV (ttAAV) (SEQ ID NO: 2 of WO2015121501), “UPenn AAV10” (SEQ ID NO: 8 of WO2015121501), “Japanese AAV10” (SEQ ID NO: 9 of WO2015121501), or variants thereof.

[0712] According to the present invention, AAV capsid serotype selection or use may be from a variety of species. In one embodiment, the AAV may be an avian AAV (AAAV). The AAAV serotype may be, or have, a sequence as described in U.S. Pat. No. 9,238,800, the contents of which are herein incorporated by reference in their entirety, such as, but not limited to, AAAV (SEQ ID NO: 1, 2, 4, 6, 8, 10, 12, and 14 of U.S. Pat. No. 9,238,800), or variants thereof.

[0713] In one embodiment, the AAV may be a bovine AAV (BAAV). The BAAV serotype may be, or have, a sequence as described in U.S. Pat. No. 9,193,769, the contents of which are herein incorporated by reference in their entirety, such as, but not limited to, BAAV (SEQ ID NO: 1 and 6 of U.S. Pat. No. 9,193,769), or variants thereof. The BAAV serotype may be or have a sequence as described in U.S. Pat. No. 7,427,396, the contents of which are herein incorporated by reference in their entirety, such as, but not limited to, BAAV (SEQ ID NO: 5 and 6 of U.S. Pat. No. 7,427,396), or variants thereof.

[0714] In one embodiment, the AAV may be a caprine AAV. The caprine AAV serotype may be, or have, a sequence as described in U.S. Pat. No. 7,427,396, the contents of which are herein incorporated by reference in their entirety, such as, but not limited to, caprine AAV (SEQ ID NO: 3 of U.S. Pat. No. 7,427,396), or variants thereof.

[0715] In other embodiments the AAV may be engineered as a hybrid AAV from two or more parental serotypes. In one embodiment, the AAV may be AAV2G9 which comprises sequences from AAV2 and AAV9. The AAV2G9 AAV serotype may be, or have, a sequence as described in United States Patent Publication No. US20160017005, the contents of which are herein incorporated by reference in its entirety.

[0716] In one embodiment, the AAV may be a serotype generated by the AAV9 capsid library with mutations in amino acids 390-627 (VP1 numbering) as described by Pulicherla et al. (Molecular Therapy 19(6):1070-1078 (2011), the contents of which are herein incorporated by reference in their entirety. The serotype and corresponding nucleotide and amino acid substitutions may be, but is not limited to, AAV9.1 (G1594C; D532H), AAV6.2 (T1418A and T1436X; V473D and I479K), AAV9.3 (T1238A; F413Y), AAV9.4 (T1250C and A1617T; F417S), AAV9.5 (A1235G, A1314T, A1642G, C1760T; Q412R, T548A, A587V), AAV9.6 (T1231A; F4111), AAV9.9 (G1203A, G1785T; W595C), AAV9.10 (A1500G, T1676C; M559T), AAV9.11 (A1425T, A1702C, A1769T; T568P, Q590L), AAV9.13 (A1369C, A1720T; N457H, T574S), AAV9.14 (T1340A, T1362C, T1560C, G1713A; L447H), AAV9.16 (A1775T; Q592L), AAV9.24 (T1507C, T1521G; W503R), AAV9.26 (A1337G, A1769C; Y446C, Q590P), AAV9.33 (A1667C; D556A), AAV9.34 (A1534G, C1794T; N512D), AAV9.35 (A1289T, T1450A, C1494T, A1515T, C1794A, G1816A; Q430L, Y484N, N98K, V606I), AAV9.40 (A1694T, E565V), AAV9.41 (A1348T, T1362C; T450S), AAV9.44 (A1684C, A1701T, A1737G; N562H, K567N), AAV9.45 (A1492T, C1804T; N498Y, L602F), AAV9.46 (G1441C, T1525C, T1549G; G481R, W509R, L517V), 9.47 (G1241A, G1358A, A1669G, C1745T; S414N, G453D, K557E, T5821), AAV9.48 (C1445T, A1736T; P482L, Q579L), AAV9.50 (A1638T, C1683T, T1805A; Q546H, L602H), AAV9.53 (G1301A, A1405C, C1664T, G181iT; R134Q, S469R, A555V, G604V), AAV9.54 (C1531A, T1609A; L511I, L537M), AAV9.55 (T1605A; F535L), AAV9.58 (C1475T, C1579A; T492I, H527N), AAV.59 (T1336C; Y446H), AAV9.61 (A1493T; N498I), AAV9.64 (C1531A, A1617T; L511I), AAV9.65 (C1335T, T1530C, C1568A; A523D), AAV9.68 (C1510A; P504T), AAV9.80 (G1441A, G481R), AAV9.83 (C1402A, A1500T; P468T, E500D), AAV9.87 (T1464C, T1468C; S490P), AAV9.90 (A1196T; Y399F), AAV9.91 (T1316G, A1583T, C1782G, T1806C; L439R, K5281), AAV9.93 (A1273G, A1421G, A1638C, C1712T, G1732A, A1744T, A1832T; S425G, Q474R, Q546H, P571L, G578R, T582S, D611V), AAV9.94 (A1675T; M559L) and AAV9.95 (T1605A; F535L).

[0717] In some embodiments, the AAV serotype may be, or have, a sequence as described in International Publication No. WO2016049230, the contents of which are herein incorporated by reference in their entirety, such as, but not limited to AAVF1/HSC1 (SEQ ID NO: 2 and 20 of WO2016049230), AAVF2/HSC2 (SEQ ID NO: 3 and 21 of WO2016049230), AAVF3/HSC3 (SEQ ID NO: 5 and 22 of WO2016049230), AAVF4/HSC4 (SEQ ID NO: 6 and 23 of WO2016049230), AAVF5/HSC5 (SEQ ID NO: 11 and 25 of WO2016049230), AAVF6/HSC6 (SEQ ID NO: 7 and 24 of WO2016049230), AAVF7/HSC7 (SEQ ID NO: 8 and 27 of WO2016049230), AAVF8/HSC8 (SEQ ID NO: 9 and 28 of WO2016049230), AAVF9/HSC9 (SEQ ID NO: 10 and 29 of WO2016049230), AAVF11/HSC11 (SEQ ID NO: 4 and 26 of WO2016049230), AAVF12/HSC12 (SEQ ID NO: 12 and 30 of WO2016049230), AAVF13/HSC13 (SEQ ID NO: 14 and 31 of WO2016049230), AAVF14/HSC14 (SEQ ID NO: 15 and 32 of WO2016049230), AAVF15/HSC15 (SEQ ID NO: 16 and 33 of WO2016049230), AAVF16/HSC16 (SEQ ID NO: 17 and 34 of WO2016049230), AAVF17/HSC17 (SEQ ID NO: 13 and 35 of WO2016049230), or variants or derivatives thereof.

[0718] In some embodiments, the AAV serotype may be, or have, a sequence as described in U.S. Pat. No. 8,734,809, the contents of which are herein incorporated by reference in their entirety, such as, but not limited to, AAV CBr-E1 (SEQ ID NO: 13 and 87 of U.S. Pat. No. 8,734,809), AAV CBr-E2 (SEQ ID NO: 14 and 88 of U.S. Pat. No. 8,734,809), AAV CBr-E3 (SEQ ID NO: 15 and 89 of U.S. Pat. No. 8,734,809), AAV CBr-E4 (SEQ ID NO: 16 and 90 of U.S. Pat. No. 8,734,809), AAV CBr-E5 (SEQ ID NO: 17 and 91 of U.S. Pat. No. 8,734,809), AAV CBr-e5 (SEQ ID NO: 18 and 92 of U.S. Pat. No. 8,734,809), AAV CBr-E6 (SEQ ID NO: 19 and 93 of U.S. Pat. No. 8,734,809), AAV CBr-E7 (SEQ ID NO: 20 and 94 of U.S. Pat. No. 8,734,809), AAV CBr-E8 (SEQ ID NO: 21 and 95 of U.S. Pat. No. 8,734,809), AAV CLv-D1 (SEQ ID NO: 22 and 96 of U.S. Pat. No. 8,734,809), AAV CLv-D2 (SEQ ID NO: 23 and 97 of U.S. Pat. No. 8,734,809), AAV CLv-D3 (SEQ ID NO: 24 and 98 of U.S. Pat. No. 8,734,809), AAV CLv-D4 (SEQ ID NO: 25 and 99 of U.S. Pat. No. 8,734,809), AAV CLv-D5 (SEQ ID NO: 26 and 100 of U.S. Pat. No. 8,734,809), AAV CLv-D6 (SEQ ID NO: 27 and 101 of U.S. Pat. No. 8,734,809), AAV CLv-D7 (SEQ ID NO: 28 and 102 of U.S. Pat. No. 8,734,809), AAV CLv-D8 (SEQ ID NO: 29 and 103 of U.S. Pat. No. 8,734,809), AAV CLv-E1 (SEQ ID NO: 13 and 87 of U.S. Pat. No. 8,734,809), AAV CLv-R1 (SEQ ID NO: 30 and 104 of U.S. Pat. No. 8,734,809), AAV CLv-R2 (SEQ ID NO: 31 and 105 of U.S. Pat. No. 8,734,809), AAV CLv-R3 (SEQ ID NO: 32 and 106 of U.S. Pat. No. 8,734,809), AAV CLv-R4 (SEQ ID NO: 33 and 107 of U.S. Pat. No. 8,734,809), AAV CLv-R5 (SEQ ID NO: 34 and 108 of U.S. Pat. No. 8,734,809), AAV CLv-R6 (SEQ ID NO: 35 and 109 of U.S. Pat. No. 8,734,809), AAV CLv-R7 (SEQ ID NO: 36 and 110 of U.S. Pat. No. 8,734,809), AAV CLv-R8 (SEQ ID NO: 37 and 111 of U.S. Pat. No. 8,734,809), AAV CLv-R9 (SEQ ID NO: 38 and 112 of U.S. Pat. No. 8,734,809), AAV CLg-F1 (SEQ ID NO: 39 and 113 of U.S. Pat. No. 8,734,809), AAV CLg-F2 (SEQ ID NO: 40 and 114 of U.S. Pat. No. 8,734,809), AAV CLg-F3 (SEQ ID NO: 41 and 115 of U.S. Pat. No. 8,734,809), AAV CLg-F4 (SEQ ID NO: 42 and 116 of U.S. Pat. No. 8,734,809), AAV CLg-F5 (SEQ ID NO: 43 and 117 of U.S. Pat. No. 8,734,809), AAV CLg-F6 (SEQ ID NO: 43 and 117 of U.S. Pat. No. 8,734,809), AAV CLg-F7 (SEQ ID NO: 44 and 118 of U.S. Pat. No. 8,734,809), AAV CLg-F8 (SEQ ID NO: 43 and 117 of U.S. Pat. No. 8,734,809), AAV CSp-1 (SEQ ID NO: 45 and 119 of U.S. Pat. No. 8,734,809), AAV CSp-10 (SEQ ID NO: 46 and 120 of U.S. Pat. No. 8,734,809), AAV CSp-11 (SEQ ID NO: 47 and 121 of U.S. Pat. No. 8,734,809), AAV CSp-2 (SEQ ID NO: 48 and 122 of U.S. Pat. No. 8,734,809), AAV CSp-3 (SEQ ID NO: 49 and 123 of U.S. Pat. No. 8,734,809), AAV CSp-4 (SEQ ID NO: 50 and 124 of U.S. Pat. No. 8,734,809), AAV CSp-6 (SEQ ID NO: 51 and 125 of U.S. Pat. No. 8,734,809), AAV CSp-7 (SEQ ID NO: 52 and 126 of U.S. Pat. No. 8,734,809), AAV CSp-8 (SEQ ID NO: 53 and 127 of U.S. Pat. No. 8,734,809), AAV CSp-9 (SEQ ID NO: 54 and 128 of U.S. Pat. No. 8,734,809), AAV CHt-2 (SEQ ID NO: 55 and 129 of U.S. Pat. No. 8,734,809), AAV CHt-3 (SEQ ID NO: 56 and 130 of U.S. Pat. No. 8,734,809), AAV CKd-1 (SEQ ID NO: 57 and 131 of U.S. Pat. No. 8,734,809), AAV CKd-10 (SEQ ID NO: 58 and 132 of U.S. Pat. No. 8,734,809), AAV CKd-2 (SEQ ID NO: 59 and 133 of U.S. Pat. No. 8,734,809), AAV CKd-3 (SEQ ID NO: 60 and 134 of U.S. Pat. No. 8,734,809), AAV CKd-4 (SEQ ID NO: 61 and 135 of U.S. Pat. No. 8,734,809), AAV CKd-6 (SEQ ID NO: 62 and 136 of U.S. Pat. No. 8,734,809), AAV CKd-7 (SEQ ID NO: 63 and 137 of U.S. Pat. No. 8,734,809), AAV CKd-8 (SEQ ID NO: 64 and 138 of U.S. Pat. No. 8,734,809), AAV CLv-1 (SEQ ID NO: 35 and 139 of U.S. Pat. No. 8,734,809), AAV CLv-12 (SEQ ID NO: 66 and 140 of U.S. Pat. No. 8,734,809), AAV CLv-13 (SEQ ID NO: 67 and 141 of U.S. Pat. No. 8,734,809), AAV CLv-2 (SEQ ID NO: 68 and 142 of U.S. Pat. No. 8,734,809), AAV CLv-3 (SEQ ID NO: 69 and 143 of U.S. Pat. No. 8,734,809), AAV CLv-4 (SEQ ID NO: 70 and 144 of U.S. Pat. No. 8,734,809), AAV CLv-6 (SEQ ID NO: 71 and 145 of U.S. Pat. No. 8,734,809), AAV CLv-8 (SEQ ID NO: 72 and 146 of U.S. Pat. No. 8,734,809), AAV CKd-B1 (SEQ ID NO: 73 and 147 of U.S. Pat. No. 8,734,809), AAV CKd-B2 (SEQ ID NO: 74 and 148 of U.S. Pat. No. 8,734,809), AAV CKd-B3 (SEQ ID NO: 75 and 149 of U.S. Pat. No. 8,734,809), AAV CKd-B4 (SEQ ID NO: 76 and 150 of U.S. Pat. No. 8,734,809), AAV CKd-B5 (SEQ ID NO: 77 and 151 of U.S. Pat. No. 8,734,809), AAV CKd-B6 (SEQ ID NO: 78 and 152 of U.S. Pat. No. 8,734,809), AAV CKd-B7 (SEQ ID NO: 79 and 153 of U.S. Pat. No. 8,734,809), AAV CKd-B8 (SEQ ID NO: 80 and 154 of U.S. Pat. No. 8,734,809), AAV CKd-H1 (SEQ ID NO: 81 and 155 of U.S. Pat. No. 8,734,809), AAV CKd-H2 (SEQ ID NO: 82 and 156 of U.S. Pat. No. 8,734,809), AAV CKd-H3 (SEQ ID NO: 83 and 157 of U.S. Pat. No. 8,734,809), AAV CKd-H4 (SEQ ID NO: 84 and 158 of U.S. Pat. No. 8,734,809), AAV CKd-H5 (SEQ ID NO: 85 and 159 of U.S. Pat. No. 8,734,809), AAV CKd-H6 (SEQ ID NO: 77 and 151 of U.S. Pat. No. 8,734,809), AAV CHt-1 (SEQ ID NO: 86 and 160 of U.S. Pat. No. 8,734,809), AAV CLv1-1 (SEQ ID NO: 171 of U.S. Pat. No. 8,734,809), AAV CLv1-2 (SEQ ID NO: 172 of U.S. Pat. No. 8,734,809), AAV CLv1-3 (SEQ ID NO: 173 of U.S. Pat. No. 8,734,809), AAV CLv1-4 (SEQ ID NO: 174 of U.S. Pat. No. 8,734,809), AAV Clv1-7 (SEQ ID NO: 175 of U.S. Pat. No. 8,734,809), AAV Clv1-8 (SEQ ID NO: 176 of U.S. Pat. No. 8,734,809), AAV Clv1-9 (SEQ ID NO: 177 of U.S. Pat. No. 8,734,809), AAV Clv1-10 (SEQ ID NO: 178 of U.S. Pat. No. 8,734,809), AAV.VR-355 (SEQ ID NO: 181 of U.S. Pat. No. 8,734,809), AAV.hu.48R3 (SEQ ID NO: 183 of U.S. Pat. No. 8,734,809), or variants or derivatives thereof.

[0719] In some embodiments, the AAV serotype may be, or have, a sequence as described in International Publication No. WO2016065001, the contents of which are herein incorporated by reference in their entirety, such as, but not limited to AAV CHt-P2 (SEQ ID NO: 1 and 51 of WO2016065001), AAV CHt-P5 (SEQ ID NO: 2 and 52 of WO2016065001), AAV CHt-P9 (SEQ ID NO: 3 and 53 of WO2016065001), AAV CBr-7.1 (SEQ ID NO: 4 and 54 of WO2016065001), AAV CBr-7.2 (SEQ ID NO: 5 and 55 of WO2016065001), AAV CBr-7.3 (SEQ ID NO: 6 and 56 of WO2016065001), AAV CBr-7.4 (SEQ ID NO: 7 and 57 of WO2016065001), AAV CBr-7.5 (SEQ ID NO: 8 and 58 of WO2016065001), AAV CBr-7.7 (SEQ ID NO: 9 and 59 of WO2016065001), AAV CBr-7.8 (SEQ ID NO: 10 and 60 of WO2016065001), AAV CBr-7.10 (SEQ ID NO: 11 and 61 of WO2016065001), AAV CKd-N3 (SEQ ID NO: 12 and 62 of WO2016065001), AAV CKd-N4 (SEQ ID NO: 13 and 63 of WO2016065001), AAV CKd-N9 (SEQ ID NO: 14 and 64 of WO2016065001), AAV CLv-L4 (SEQ ID NO: 15 and 65 of WO2016065001), AAV CLv-L5 (SEQ ID NO: 16 and 66 of WO2016065001), AAV CLv-L6 (SEQ ID NO: 17 and 67 of WO2016065001), AAV CLv-K1 (SEQ ID NO: 18 and 68 of WO2016065001), AAV CLv-K3 (SEQ ID NO: 19 and 69 of WO2016065001), AAV CLv-K6 (SEQ ID NO: 20 and 70 of WO2016065001), AAV CLv-M1 (SEQ ID NO: 21 and 71 of WO2016065001), AAV CLv-M11 (SEQ ID NO: 22 and 72 of WO2016065001), AAV CLv-M2 (SEQ ID NO: 23 and 73 of WO2016065001), AAV CLv-M5 (SEQ ID NO: 24 and 74 of WO2016065001), AAV CLv-M6 (SEQ ID NO: 25 and 75 of WO2016065001), AAV CLv-M7 (SEQ ID NO: 26 and 76 of WO2016065001), AAV CLv-M8 (SEQ ID NO: 27 and 77 of WO2016065001), AAV CLv-M9 (SEQ ID NO: 28 and 78 of WO2016065001), AAV CHt-P1 (SEQ ID NO: 29 and 79 of WO2016065001), AAV CHt-P6 (SEQ ID NO: 30 and 80 of WO2016065001), AAV CHt-P8 (SEQ ID NO: 31 and 81 of WO2016065001), AAV CHt-6.1 (SEQ ID NO: 32 and 82 of WO2016065001), AAV CHt-6.10 (SEQ ID NO: 33 and 83 of WO2016065001), AAV CHt-6.5 (SEQ ID NO: 34 and 84 of WO2016065001), AAV CHt-6.6 (SEQ ID NO: 35 and 85 of WO2016065001), AAV CHt-6.7 (SEQ ID NO: 36 and 86 of WO2016065001), AAV CHt-6.8 (SEQ ID NO: 37 and 87 of WO2016065001), AAV CSp-8.10 (SEQ ID NO: 38 and 88 of WO2016065001), AAV CSp-8.2 (SEQ ID NO: 39 and 89 of WO2016065001), AAV CSp-8.4 (SEQ ID NO: 40 and 90 of WO2016065001), AAV CSp-8.5 (SEQ ID NO: 41 and 91 of WO2016065001), AAV CSp-8.6 (SEQ ID NO: 42 and 92 of WO2016065001), AAV CSp-8.7 (SEQ ID NO: 43 and 93 of WO2016065001), AAV CSp-8.8 (SEQ ID NO: 44 and 94 of WO2016065001), AAV CSp-8.9 (SEQ ID NO: 45 and 95 of WO2016065001), AAV CBr-B7.3 (SEQ ID NO: 46 and 96 of WO2016065001), AAV CBr-B7.4 (SEQ ID NO: 47 and 97 of WO2016065001), AAV3B (SEQ ID NO: 48 and 98 of WO2016065001), AAV4 (SEQ ID NO: 49 and 99 of WO2016065001), AAV5 (SEQ ID NO: 50 and 100 of WO2016065001), or variants or derivatives thereof.

[0720] In one embodiment, the AAV may be a serotype comprising at least one AAV capsid CD8+ T-cell epitope. As a non-limiting example, the serotype may be AAV1, AAV2 or AAV8.

[0721] In one embodiment, the AAV may be a serotype selected from any of those found in Table 4.

[0722] In one embodiment, the AAV may comprise a sequence, fragment or variant thereof, of the sequences in Table 4.

[0723] In one embodiment, the AAV may be encoded by a sequence, fragment or variant as described in Table 4.

TABLE 4
AAV Serotypes

| | SEQ | |
|---|---|---|
| Serotype | ID NO | Reference Information |
| AAV1 | 28 | US20150159173 SEQ ID NO: 11, US20150315612 SEQ ID NO: 202 |
| AAV1 | 29 | US20160017295 SEQ ID NO: 1US20030138772 SEQ ID NO: 64, |
| | | US20150159173 SEQ ID NO: 27, US20150315612 SEQ ID NO: 219, |
| | | U.S. Pat. No. 7,198,951 SEQ ID NO: 5 |
| AAV1 | 30 | US20030138772 SEQ ID NO: 6 |
| AAV1.3 | 31 | US20030138772 SEQ ID NO: 14 |
| AAV10 | 32 | US20030138772 SEQ ID NO: 117 |
| AAV10 | 33 | WO2015121501 SEQ ID NO: 9 |
| AAV10 | 34 | WO2015121501 SEQ ID NO: 8 |
| AAV11 | 35 | US20030138772 SEQ ID NO: 118 |
| AAV12 | 36 | US20030138772 SEQ ID NO: 119 |
| AAV2 | 37 | US20150159173 SEQ ID NO: 7, US20150315612 SEQ ID NO: 211 |
| AAV2 | 38 | US20030138772 SEQ ID NO: 70, US20150159173 SEQ ID NO: 23, |
| | | US20150315612 SEQ ID NO: 221, US20160017295 SEQ ID NO: 2, |
| | | U.S. Pat. No. 6,156,303 SEQ ID NO: 4, U.S. Pat. No. 7,198,951 SEQ ID NO: 4, WO2015121501 |
| | | SEQ ID NO: 1 |
| AAV2 | 39 | U.S. Pat. No. 6,156,303 SEQ ID NO: 8 |
| AAV2 | 40 | US20030138772 SEQ ID NO: 7 |
| AAV2 | 41 | U.S. Pat. No. 6,156,303 SEQ ID NO: 3 |
| AAV2.5T | 42 | U.S. Pat. No. 9,233,131 SEQ ID NO: 42 |
| AAV223.10 | 43 | US20030138772 SEQ ID NO: 75 |
| AAV223.2 | 44 | US20030138772 SEQ ID NO: 49 |
| AAV223.2 | 45 | US20030138772 SEQ ID NO: 76 |
| AAV223.4 | 46 | US20030138772 SEQ ID NO: 50 |
| AAV223.4 | 47 | US20030138772 SEQ ID NO: 73 |
| AAV223.5 | 48 | US20030138772 SEQ ID NO: 51 |
| AAV223.5 | 49 | US20030138772 SEQ ID NO: 74 |
| AAV223.6 | 50 | US20030138772 SEQ ID NO: 52 |
| AAV223.6 | 51 | US20030138772 SEQ ID NO: 78 |
| AAV223.7 | 52 | US20030138772 SEQ ID NO: 53 |
| AAV223.7 | 53 | US20030138772 SEQ ID NO: 77 |
| AAV29.3 | 54 | US20030138772 SEQ ID NO: 82 |
| AAV29.4 | 55 | US20030138772 SEQ ID NO: 12 |
| AAV29.5 | 56 | US20030138772 SEQ ID NO: 83 |
| AAV29.5 (AAVbb.2) | 57 | US20030138772 SEQ ID NO: 13 |
| AAV3 | 58 | US20150159173 SEQ ID NO: 12 |
| AAV3 | 59 | US20030138772 SEQ ID NO: 71, US20150159173 SEQ ID NO: 28, |
| | | US20160017295 SEQ ID NO: 3, U.S. Pat. No. 7,198,951 SEQ ID NO: 6 |
| AAV3 | 60 | US20030138772 SEQ ID NO: 8 |
| AAV3.3b | 61 | US20030138772 SEQ ID NO: 72 |
| AAV3-3 | 62 | US20150315612 SEQ ID NO: 200 |
| AAV3-3 | 63 | US20150315612 SEQ ID NO: 217 |
| AAV3a | 64 | U.S. Pat. No. 6,156,303 SEQ ID NO: 5 |
| AAV3a | 65 | U.S. Pat. No. 6,156,303 SEQ ID NO: 9 |
| AAV3b | 66 | U.S. Pat. No. 6,156,303 SEQ ID NO: 6 |
| AAV3b | 67 | U.S. Pat. No. 6,156,303 SEQ ID NO: 10 |
| AAV3b | 68 | U.S. Pat. No. 6,156,303 SEQ ID NO: 1 |
| AAV4 | 69 | US20140348794 SEQ ID NO: 17 |
| AAV4 | 70 | US20140348794 SEQ ID NO: 5 |
| AAV4 | 71 | US20140348794 SEQ ID NO: 3 |
| AAV4 | 72 | US20140348794 SEQ ID NO: 14 |
| AAV4 | 73 | US20140348794 SEQ ID NO: 15 |
| AAV4 | 74 | US20140348794 SEQ ID NO: 19 |
| AAV4 | 75 | US20140348794 SEQ ID NO: 12 |
| AAV4 | 76 | US20140348794 SEQ ID NO: 13 |
| AAV4 | 77 | US20140348794 SEQ ID NO: 7 |
| AAV4 | 78 | US20140348794 SEQ ID NO: 8 |
| AAV4 | 79 | US20140348794 SEQ ID NO: 9 |
| AAV4 | 80 | US20140348794 SEQ ID NO: 2 |
| AAV4 | 81 | US20140348794 SEQ ID NO: 10 |
| AAV4 | 82 | US20140348794 SEQ ID NO: 11 |
| AAV4 | 83 | US20140348794 SEQ ID NO: 18 |
| AAV4 | 84 | US20030138772 SEQ ID NO: 63, US20160017295 SEQ ID NO: 4, |
| | | US20140348794 SEQ ID NO: 4 |
| AAV4 | 85 | US20140348794 SEQ ID NO: 16 |
| AAV4 | 86 | US20140348794 SEQ ID NO: 20 |
| AAV4 | 87 | US20140348794 SEQ ID NO: 6 |
| AAV4 | 88 | US20140348794 SEQ ID NO: 1 |
| AAV42.2 | 89 | US20030138772 SEQ ID NO: 9 |
| AAV42.2 | 90 | US20030138772 SEQ ID NO: 102 |
| AAV42.3b | 91 | US20030138772 SEQ ID NO: 36 |
| AAV42.3B | 92 | US20030138772 SEQ ID NO: 107 |
| AAV42.4 | 93 | US20030138772 SEQ ID NO: 33 |
| AAV42.4 | 94 | US20030138772 SEQ ID NO: 88 |
| AAV42.8 | 95 | US20030138772 SEQ ID NO: 27 |
| AAV42.8 | 96 | US20030138772 SEQ ID NO: 85 |
| AAV43.1 | 97 | US20030138772 SEQ ID NO: 39 |
| AAV43.1 | 98 | US20030138772 SEQ ID NO: 92 |
| AAV43.12 | 99 | US20030138772 SEQ ID NO: 41 |
| AAV43.12 | 100 | US20030138772 SEQ ID NO: 93 |
| AAV43.20 | 101 | US20030138772 SEQ ID NO: 42 |
| AAV43.20 | 102 | US20030138772 SEQ ID NO: 99 |
| AAV43.21 | 103 | US20030138772 SEQ ID NO: 43 |
| AAV43.21 | 104 | US20030138772 SEQ ID NO: 96 |
| AAV43.23 | 105 | US20030138772 SEQ ID NO: 44 |
| AAV43.23 | 106 | US20030138772 SEQ ID NO: 98 |
| AAV43.25 | 107 | US20030138772 SEQ ID NO: 45 |
| AAV43.25 | 108 | US20030138772 SEQ ID NO: 97 |
| AAV43.5 | 109 | US20030138772 SEQ ID NO: 40 |
| AAV43.5 | 110 | US20030138772 SEQ ID NO: 94 |
| AAV4-4 | 111 | US20150315612 SEQ ID NO: 201 |
| AAV4-4 | 112 | US20150315612 SEQ ID NO: 218 |
| AAV44.1 | 113 | US20030138772 SEQ ID NO: 46 |
| AAV44.1 | 114 | US20030138772 SEQ ID NO: 79 |
| AAV44.5 | 115 | US20030138772 SEQ ID NO: 47 |
| AAV44.5 | 116 | US20030138772 SEQ ID NO: 80 |
| AAV4407 | 117 | US20150315612 SEQ ID NO: 90 |
| AAV5 | 118 | U.S. Pat. No. 7,427,396 SEQ ID NO: 1 |
| AAV5 | 119 | US20030138772 SEQ ID NO: 114 |
| AAV5 | 120 | US20160017295 SEQ ID NO: 5, U.S. Pat. No. 7,427,396 SEQ ID NO: 2, |
| | | US20150315612 SEQ ID NO: 216 |
| AAV5 | 121 | US20150315612 SEQ ID NO: 199 |
| AAV6 | 122 | US20150159173 SEQ ID NO: 13 |
| AAV6 | 123 | US20030138772 SEQ ID NO: 65, US20150159173 SEQ ID NO: 29, |
| | | US20160017295 SEQ ID NO: 6, U.S. Pat. No. 6,156,303 SEQ ID NO: 7 |
| AAV6 | 124 | U.S. Pat. No. 6,156,303 SEQ ID NO: 11 |
| AAV6 | 125 | U.S. Pat. No. 6,156,303 SEQ ID NO: 2 |
| AAV6 | 126 | US20150315612 SEQ ID NO: 203 |
| AAV6 | 127 | US20150315612 SEQ ID NO: 220 |
| AAV6.1 | 128 | US20150159173 |
| AAV6.12 | 129 | US20150159173 |
| AAV6.2 | 130 | US20150159173 |
| AAV7 | 131 | US20150159173 SEQ ID NO: 14 |
| AAV7 | 132 | US20150315612 SEQ ID NO: 183 |
| AAV7 | 133 | US20030138772 SEQ ID NO: 2, US20150159173 SEQ ID NO: 30, |
| | | US20150315612 SEQ ID NO: 181, US20160017295 SEQ ID NO: 7 |
| AAV7 | 134 | US20030138772 SEQ ID NO: 3 |
| AAV7 | 135 | US20030138772 SEQ ID NO: 1, US20150315612 SEQ ID NO: 180 |
| AAV7 | 136 | US20150315612 SEQ ID NO: 213 |
| AAV7 | 137 | US20150315612 SEQ ID NO: 222 |
| AAV8 | 138 | US20150159173 SEQ ID NO: 15 |
| AAV8 | 139 | US20150376240 SEQ ID NO: 7 |
| AAV8 | 140 | US20030138772 SEQ ID NO: 4, US20150315612 SEQ ID NO: 182 |
| AAV8 | 141 | US20030138772 SEQ ID NO: 95, US20140359799 SEQ ID NO: 1, |
| | | US20150159173 SEQ ID NO: 31, US20160017295 SEQ ID NO: 8, |
| | | U.S. Pat. No. 7,198,951 SEQ ID NO: 7, US20150315612 SEQ ID NO: 223 |
| AAV8 | 142 | US20150376240 SEQ ID NO: 8 |
| AAV8 | 143 | US20150315612 SEQ ID NO: 214 |
| AAV-8b | 144 | US20150376240 SEQ ID NO: 5 |
| AAV-8b | 145 | US20150376240 SEQ ID NO: 3 |
| AAV-8h | 146 | US20150376240 SEQ ID NO: 6 |
| AAV-8h | 147 | US20150376240 SEQ ID NO: 4 |
| AAV9 | 148 | US20030138772 SEQ ID NO: 5 |
| AAV9 | 149 | U.S. Pat. No. 7,198,951 SEQ ID NO: 1 |
| AAV9 | 150 | US20160017295 SEQ ID NO: 9 |
| AAV9 | 151 | US20030138772 SEQ ID NO: 100, U.S. Pat. No. 7,198,951 SEQ ID NO: 2 |
| AAV9 | 152 | U.S. Pat. No. 7,198,951 SEQ ID NO: 3 |
| AAV9 (AAVhu.14) | 153 | U.S. Pat. No. 7,906,111 SEQ ID NO: 3; WO2015038958 SEQ ID NO: 11 |
| AAV9 (AAVhu.14) | 154 | U.S. Pat. No. 7,906,111 SEQ ID NO: 123; WO2015038958 SEQ ID NO: 2 |
| AAVA3.1 | 155 | US20030138772 SEQ ID NO: 120 |
| AAVA3.3 | 156 | US20030138772 SEQ ID NO: 57 |
| AAVA3.3 | 157 | US20030138772 SEQ ID NO: 66 |
| AAVA3.4 | 158 | US20030138772 SEQ ID NO: 54 |
| AAVA3.4 | 159 | US20030138772 SEQ ID NO: 68 |
| AAVA3.5 | 160 | US20030138772 SEQ ID NO: 55 |
| AAVA3.5 | 161 | US20030138772 SEQ ID NO: 69 |
| AAVA3.7 | 162 | US20030138772 SEQ ID NO: 56 |
| AAVA3.7 | 163 | US20030138772 SEQ ID NO: 67 |
| AAV29.3 (AAVbb.1) | 164 | US20030138772 SEQ ID NO: 11 |
| AAVC2 | 165 | US20030138772 SEQ ID NO: 61 |
| AAVCh.5 | 166 | US20150159173 SEQ ID NO: 46, US20150315612 SEQ ID NO: 234 |
| AAVcy.2 (AAV13.3) | 167 | US20030138772 SEQ ID NO: 15 |
| AAV24.1 | 168 | US20030138772 SEQ ID NO: 101 |
| AAVcy.3 (AAV24.1) | 169 | US20030138772 SEQ ID NO: 16 |
| AAV27.3 | 170 | US20030138772 SEQ ID NO: 104 |
| AAVcy.4 (AAV27.3) | 171 | US20030138772 SEQ ID NO: 17 |
| AAVcy.5 | 172 | US20150315612 SEQ ID NO: 227 |
| AAV7.2 | 173 | US20030138772 SEQ ID NO: 103 |
| AAVcy.5 (AAV7.2) | 174 | US20030138772 SEQ ID NO: 18 |
| AAV16.3 | 175 | US20030138772 SEQ ID NO: 105 |
| AAVcy.6 (AAV16.3) | 176 | US20030138772 SEQ ID NO: 10 |
| AAVcy.5 | 177 | US20150159173 SEQ ID NO: 8 |
| AAVcy.5 | 178 | US20150159173 SEQ ID NO: 24 |
| AAVCy.5R1 | 179 | US20150159173 |
| AAVCy.5R2 | 180 | US20150159173 |
| AAVCy.5R3 | 181 | US20150159173 |
| AAVCy.5R4 | 182 | US20150159173 |
| AAVDJ | 183 | US20140359799 SEQ ID NO: 3, U.S. Pat. No. 7,588,772 SEQ ID NO: 2 |
| AAVDJ | 184 | US20140359799 SEQ ID NO: 2, U.S. Pat. No. 7,588,772 SEQ ID NO: 1 |
| AAVDJ-8 | 185 | U.S. Pat. No. 7,588,772; Grimm et al 2008 |
| AAVDJ-8 | 186 | U.S. Pat. No. 7,588,772; Grimm et al 2008 |
| AAVF5 | 187 | US20030138772 SEQ ID NO: 110 |
| AAVH2 | 188 | US20030138772 SEQ ID NO: 26 |
| AAVH6 | 189 | US20030138772 SEQ ID NO: 25 |
| AAVhE1.1 | 190 | U.S. Pat. No. 9,233,131 SEQ ID NO: 44 |
| AAVhEr1.14 | 191 | U.S. Pat. No. 9,233,131 SEQ ID NO: 46 |
| AAVhEr1.16 | 192 | U.S. Pat. No. 9,233,131 SEQ ID NO: 48 |
| AAVhEr1.18 | 193 | U.S. Pat. No. 9,233,131 SEQ ID NO: 49 |
| AAVhEr1.23 | 194 | U.S. Pat. No. 9,233,131 SEQ ID NO: 53 |
| (AAVhEr2.29) | | |
| AAVhEr1.35 | 195 | U.S. Pat. No. 9,233,131 SEQ ID NO: 50 |
| AAVhEr1.36 | 196 | U.S. Pat. No. 9,233,131 SEQ ID NO: 52 |
| AAVhEr1.5 | 197 | U.S. Pat. No. 9,233,131 SEQ ID NO: 45 |
| AAVhEr1.7 | 198 | U.S. Pat. No. 9,233,131 SEQ ID NO: 51 |
| AAVhEr1.8 | 199 | U.S. Pat. No. 9,233,131 SEQ ID NO: 47 |
| AAVhEr2.16 | 200 | U.S. Pat. No. 9,233,131 SEQ ID NO: 55 |
| AAVhEr2.30 | 201 | U.S. Pat. No. 9,233,131 SEQ ID NO: 56 |
| AAVhEr2.31 | 202 | U.S. Pat. No. 9,233,131 SEQ ID NO: 58 |
| AAVhEr2.36 | 203 | U.S. Pat. No. 9,233,131 SEQ ID NO: 57 |
| AAVhEr2.4 | 204 | U.S. Pat. No. 9,233,131 SEQ ID NO: 54 |
| AAVhEr3.1 | 205 | U.S. Pat. No. 9,233,131 SEQ ID NO: 59 |
| AAVhu.1 | 206 | US20150315612 SEQ ID NO: 46 |
| AAVhu.1 | 207 | US20150315612 SEQ ID NO: 144 |
| AAVhu.10 (AAV16.8) | 208 | US20150315612 SEQ ID NO: 56 |
| AAVhu.10 (AAV16.8) | 209 | US20150315612 SEQ ID NO: 156 |
| AAVhu.11 (AAV16.12) | 210 | US20150315612 SEQ ID NO: 57 |
| AAVhu.11 (AAV16.12) | 211 | US20150315612 SEQ ID NO: 153 |
| AAVhu.12 | 212 | US20150315612 SEQ ID NO: 59 |
| AAVhu.12 | 213 | US20150315612 SEQ ID NO: 154 |
| AAVhu.13 | 214 | US20150159173 SEQ ID NO: 16, US20150315612 SEQ ID NO: 71 |
| AAVhu.13 | 215 | US20150159173 SEQ ID NO: 32, US20150315612 SEQ ID NO: 129 |
| AAVhu.136.1 | 216 | US20150315612 SEQ ID NO: 165 |
| AAVhu.140.1 | 217 | US20150315612 SEQ ID NO: 166 |
| AAVhu.140.2 | 218 | US20150315612 SEQ ID NO: 167 |
| AAVhu.145.6 | 219 | US20150315612 SEQ ID No: 178 |
| AAVhu.15 | 220 | US20150315612 SEQ ID NO: 147 |
| AAVhu.15 (AAV33.4) | 221 | US20150315612 SEQ ID NO: 50 |
| AAVhu.156.1 | 222 | US20150315612 SEQ ID No: 179 |
| AAVhu.16 | 223 | US20150315612 SEQ ID NO: 148 |
| AAVhu.16 (AAV33.8) | 224 | US20150315612 SEQ ID NO: 51 |
| AAVhu.17 | 225 | US20150315612 SEQ ID NO: 83 |
| AAVhu.17 (AAV33.12) | 226 | US20150315612 SEQ ID NO: 4 |
| AAVhu.172.1 | 227 | US20150315612 SEQ ID NO: 171 |
| AAVhu.172.2 | 228 | US20150315612 SEQ ID NO: 172 |
| AAVhu.173.4 | 229 | US20150315612 SEQ ID NO: 173 |
| AAVhu.173.8 | 230 | US20150315612 SEQ ID NO: 175 |
| AAVhu.18 | 231 | US20150315612 SEQ ID NO: 52 |
| AAVhu.18 | 232 | US20150315612 SEQ ID NO: 149 |
| AAVhu.19 | 233 | US20150315612 SEQ ID NO: 62 |
| AAVhu.19 | 234 | US20150315612 SEQ ID NO: 133 |
| AAVhu.2 | 235 | US20150315612 SEQ ID NO: 48 |
| AAVhu.2 | 236 | US20150315612 SEQ ID NO: 143 |
| AAVhu.20 | 237 | US20150315612 SEQ ID NO: 63 |
| AAVhu.20 | 238 | US20150315612 SEQ ID NO: 134 |
| AAVhu.21 | 239 | US20150315612 SEQ ID NO: 65 |
| AAVhu.21 | 240 | US20150315612 SEQ ID NO: 135 |
| AAVhu.22 | 241 | US20150315612 SEQ ID NO: 67 |
| AAVhu.22 | 242 | US20150315612 SEQ ID NO: 138 |
| AAVhu.23 | 243 | US20150315612 SEQ ID NO: 60 |
| AAVhu.23.2 | 244 | US20150315612 SEQ ID NO: 137 |
| AAVhu.24 | 245 | US20150315612 SEQ ID NO: 66 |
| AAVhu.24 | 246 | US20150315612 SEQ ID NO: 136 |
| AAVhu.25 | 247 | US20150315612 SEQ ID NO: 49 |
| AAVhu.25 | 248 | US20150315612 SEQ ID NO: 146 |
| AAVhu.26 | 249 | US20150159173 SEQ ID NO: 17, US20150315612 SEQ ID NO: 61 |
| AAVhu.26 | 250 | US20150159173 SEQ ID NO: 33, US20150315612 SEQ ID NO: 139 |
| AAVhu.27 | 251 | US20150315612 SEQ ID NO: 64 |
| AAVhu.27 | 252 | US20150315612 SEQ ID NO: 140 |
| AAVhu.28 | 253 | US20150315612 SEQ ID NO: 68 |
| AAVhu.28 | 254 | US20150315612 SEQ ID NO: 130 |
| AAVhu.29 | 255 | US20150315612 SEQ ID NO: 69 |
| AAVhu.29 | 256 | US20150159173 SEQ ID NO: 42, US20150315612 SEQ ID NO: 132 |
| AAVhu.29 | 257 | US20150315612 SEQ ID NO: 225 |
| AAVhu.29R | 258 | US20150159173 |
| AAVhu.3 | 259 | US20150315612 SEQ ID NO: 44 |
| AAVhu.3 | 260 | US20150315612 SEQ ID NO: 145 |
| AAVhu.30 | 261 | US20150315612 SEQ ID NO: 70 |
| AAVhu.30 | 262 | US20150315612 SEQ ID NO: 131 |
| AAVhu.31 | 263 | US20150315612 SEQ ID NO: 1 |
| AAVhu.31 | 264 | US20150315612 SEQ ID NO: 121 |
| AAVhu.32 | 265 | US20150315612 SEQ ID NO: 2 |
| AAVhu.32 | 266 | US20150315612 SEQ ID NO: 122 |
| AAVhu.33 | 267 | US20150315612 SEQ ID NO: 75 |
| AAVhu.33 | 268 | US20150315612 SEQ ID NO: 124 |
| AAVhu.34 | 269 | US20150315612 SEQ ID NO: 72 |
| AAVhu.34 | 270 | US20150315612 SEQ ID NO: 125 |
| AAVhu.35 | 271 | US20150315612 SEQ ID NO: 73 |
| AAVhu.35 | 272 | US20150315612 SEQ ID NO: 164 |
| AAVhu.36 | 273 | US20150315612 SEQ ID NO: 74 |
| AAVhu.36 | 274 | US20150315612 SEQ ID NO: 126 |
| AAVhu.37 | 275 | US20150159173 SEQ ID NO: 34, US20150315612 SEQ ID NO: 88 |
| AAVhu.37 (AAV106.1) | 276 | US20150315612 SEQ ID NO: 10, US20150159173 SEQ ID NO: 18 |
| AAVhu.38 | 277 | US20150315612 SEQ ID NO: 161 |
| AAVhu.39 | 278 | US20150315612 SEQ ID NO: 102 |
| AAVhu.39 (AAVLG-9) | 279 | US20150315612 SEQ ID NO: 24 |
| AAVhu.4 | 280 | US20150315612 SEQ ID NO: 47 |
| AAVhu.4 | 281 | US20150315612 SEQ ID NO: 141 |
| AAVhu.40 | 282 | US20150315612 SEQ ID NO: 87 |
| AAVhu.40 (AAV114.3) | 283 | US20150315612 SEQ ID No: 11 |
| AAVhu.41 | 284 | US20150315612 SEQ ID NO: 91 |
| AAVhu.41 (AAV127.2) | 285 | US20150315612 SEQ ID NO: 6 |
| AAVhu.42 | 286 | US20150315612 SEQ ID NO: 85 |
| AAVhu.42 (AAV127.5) | 287 | US20150315612 SEQ ID NO: 8 |
| AAVhu.43 | 288 | US20150315612 SEQ ID NO: 160 |
| AAVhu.43 | 289 | US20150315612 SEQ ID NO: 236 |
| AAVhu.43 (AAV128.1) | 290 | US20150315612 SEQ ID NO: 80 |
| AAVhu.44 | 291 | US20150159173 SEQ ID NO: 45, US20150315612 SEQ ID NO: 158 |
| AAVhu.44 (AAV128.3) | 292 | US20150315612 SEQ ID NO: 81 |
| AAVhu.44R1 | 293 | US20150159173 |
| AAVhu.44R2 | 294 | US20150159173 |
| AAVhu.44R3 | 295 | US20150159173 |
| AAVhu.45 | 296 | US20150315612 SEQ ID NO: 76 |
| AAVhu.45 | 297 | US20150315612 SEQ ID NO: 127 |
| AAVhu.46 | 298 | US20150315612 SEQ ID NO: 82 |
| AAVhu.46 | 299 | US20150315612 SEQ ID NO: 159 |
| AAVhu.46 | 300 | US20150315612 SEQ ID NO: 224 |
| AAVhu.47 | 301 | US20150315612 SEQ ID NO: 77 |
| AAVhu.47 | 302 | US20150315612 SEQ ID NO: 128 |
| AAVhu.48 | 303 | US20150159173 SEQ ID NO: 38 |
| AAVhu.48 | 304 | US20150315612 SEQ ID NO: 157 |
| AAVhu.48 (AAV130.4) | 305 | US20150315612 SEQ ID NO: 78 |
| AAVhu.48R1 | 306 | US20150159173 |
| AAVhu.48R2 | 307 | US20150159173 |
| AAVhu.48R3 | 308 | US20150159173 |
| AAVhu.49 | 309 | US20150315612 SEQ ID NO: 209 |
| AAVhu.49 | 310 | US20150315612 SEQ ID NO: 189 |
| AAVhu.5 | 311 | US20150315612 SEQ ID NO: 45 |
| AAVhu.5 | 312 | US20150315612 SEQ ID NO: 142 |
| AAVhu.51 | 313 | US20150315612 SEQ ID NO: 208 |
| AAVhu.51 | 314 | US20150315612 SEQ ID NO: 190 |
| AAVhu.52 | 315 | US20150315612 SEQ ID NO: 210 |
| AAVhu.52 | 316 | US20150315612 SEQ ID NO: 191 |
| AAVhu.53 | 317 | US20150159173 SEQ ID NO: 19 |
| AAVhu.53 | 318 | US20150159173 SEQ ID NO: 35 |
| AAVhu.53 (AAV145.1) | 319 | US20150315612 SEQ ID NO: 176 |
| AAVhu.54 | 320 | US20150315612 SEQ ID NO: 188 |
| AAVhu.54 (AAV145.5) | 321 | US20150315612 SEQ ID No: 177 |
| AAVhu.55 | 322 | US20150315612 SEQ ID NO: 187 |
| AAVhu.56 | 323 | US20150315612 SEQ ID NO: 205 |
| AAVhu.56 (AAV145.6) | 324 | US20150315612 SEQ ID NO: 168 |
| AAVhu.56 (AAV145.6) | 325 | US20150315612 SEQ ID NO: 192 |
| AAVhu.57 | 326 | US20150315612 SEQ ID NO: 206 |
| AAVhu.57 | 327 | US20150315612 SEQ ID NO: 169 |
| AAVhu.57 | 328 | US20150315612 SEQ ID NO: 193 |
| AAVhu.58 | 329 | US20150315612 SEQ ID NO: 207 |
| AAVhu.58 | 330 | US20150315612 SEQ ID NO: 194 |
| AAVhu.6 (AAV3.1) | 331 | US20150315612 SEQ ID NO: 5 |
| AAVhu.6 (AAV3.1) | 332 | US20150315612 SEQ ID NO: 84 |
| AAVhu.60 | 333 | US20150315612 SEQ ID NO: 184 |
| AAVhu.60 | 334 | US20150315612 SEQ ID NO: 170 |
| (AAV161.10) | | |
| AAVhu.61 | 335 | US20150315612 SEQ ID NO: 185 |
| AAVhu.61 (AAV161.6) | 336 | US20150315612 SEQ ID NO: 174 |
| AAVhu.63 | 337 | US20150315612 SEQ ID NO: 204 |
| AAVhu.63 | 338 | US20150315612 SEQ ID NO: 195 |
| AAVhu.64 | 339 | US20150315612 SEQ ID NO: 212 |
| AAVhu.64 | 340 | US20150315612 SEQ ID NO: 196 |
| AAVhu.66 | 341 | US20150315612 SEQ ID NO: 197 |
| AAVhu.67 | 342 | US20150315612 SEQ ID NO: 215 |
| AAVhu.67 | 343 | US20150315612 SEQ ID NO: 198 |
| AAVhu.7 | 344 | US20150315612 SEQ ID NO: 226 |
| AAVhu.7 | 345 | US20150315612 SEQ ID NO: 150 |
| AAVhu.7 (AAV7.3) | 346 | US20150315612 SEQ ID NO: 55 |
| AAVhu.71 | 347 | US20150315612 SEQ ID NO: 79 |
| AAVhu.8 | 348 | US20150315612 SEQ ID NO: 53 |
| AAVhu.8 | 349 | US20150315612 SEQ ID NO: 12 |
| AAVhu.8 | 350 | US20150315612 SEQ ID NO: 151 |
| AAVhu.9 (AAV3.1) | 351 | US20150315612 SEQ ID NO: 58 |
| AAVhu.9 (AAV3.1) | 352 | US20150315612 SEQ ID NO: 155 |
| AAV-LK01 | 353 | US20150376607 SEQ ID NO: 2 |
| AAV-LK01 | 354 | US20150376607 SEQ ID NO: 29 |
| AAV-LK02 | 355 | US20150376607 SEQ ID NO: 3 |
| AAV-LK02 | 356 | US20150376607 SEQ ID NO: 30 |
| AAV-LK03 | 357 | US20150376607 SEQ ID NO: 4 |
| AAV-LK03 | 358 | WO2015121501 SEQ ID NO: 12, US20150376607 SEQ ID NO: 31 |
| AAV-LK04 | 359 | US20150376607 SEQ ID NO: 5 |
| AAV-LK04 | 360 | US20150376607 SEQ ID NO: 32 |
| AAV-LK05 | 361 | US20150376607 SEQ ID NO: 6 |
| AAV-LK05 | 362 | US20150376607 SEQ ID NO: 33 |
| AAV-LK06 | 363 | US20150376607 SEQ ID NO: 7 |
| AAV-LK06 | 364 | US20150376607 SEQ ID NO: 34 |
| AAV-LK07 | 365 | US20150376607 SEQ ID NO: 8 |
| AAV-LK07 | 366 | US20150376607 SEQ ID NO: 35 |
| AAV-LK08 | 367 | US20150376607 SEQ ID NO: 9 |
| AAV-LK08 | 368 | US20150376607 SEQ ID NO: 36 |
| AAV-LK09 | 369 | US20150376607 SEQ ID NO: 10 |
| AAV-LK09 | 370 | US20150376607 SEQ ID NO: 37 |
| AAV-LK10 | 371 | US20150376607 SEQ ID NO: 11 |
| AAV-LK10 | 372 | US20150376607 SEQ ID NO: 38 |
| AAV-LK11 | 373 | US20150376607 SEQ ID NO: 12 |
| AAV-LK11 | 374 | US20150376607 SEQ ID NO: 39 |
| AAV-LK12 | 375 | US20150376607 SEQ ID NO: 13 |
| AAV-LK12 | 376 | US20150376607 SEQ ID NO: 40 |
| AAV-LK13 | 377 | US20150376607 SEQ ID NO: 14 |
| AAV-LK13 | 378 | US20150376607 SEQ ID NO: 41 |
| AAV-LK14 | 379 | US20150376607 SEQ ID NO: 15 |
| AAV-LK14 | 380 | US20150376607 SEQ ID NO: 42 |
| AAV-LK15 | 381 | US20150376607 SEQ ID NO: 16 |
| AAV-LK15 | 382 | US20150376607 SEQ ID NO: 43 |
| AAV-LK16 | 383 | US20150376607 SEQ ID NO: 17 |
| AAV-LK16 | 384 | US20150376607 SEQ ID NO: 44 |
| AAV-LK17 | 385 | US20150376607 SEQ ID NO: 18 |
| AAV-LK17 | 386 | US20150376607 SEQ ID NO: 45 |
| AAV-LK18 | 387 | US20150376607 SEQ ID NO: 19 |
| AAV-LK18 | 388 | US20150376607 SEQ ID NO: 46 |
| AAV-LK19 | 389 | US20150376607 SEQ ID NO: 20 |
| AAV-LK19 | 390 | US20150376607 SEQ ID NO: 47 |
| AAV-PAEC | 391 | US20150376607 SEQ ID NO: 1 |
| AAV-PAEC | 392 | US20150376607 SEQ ID NO: 48 |
| AAV-PAEC11 | 393 | US20150376607 SEQ ID NO: 26 |
| AAV-PAEC11 | 394 | US20150376607 SEQ ID NO: 54 |
| AAV-PAEC12 | 395 | US20150376607 SEQ ID NO: 27 |
| AAV-PAEC12 | 396 | US20150376607 SEQ ID NO: 51 |
| AAV-PAEC13 | 397 | US20150376607 SEQ ID NO: 28 |
| AAV-PAEC13 | 398 | US20150376607 SEQ ID NO: 49 |
| AAV-PAEC2 | 399 | US20150376607 SEQ ID NO: 21 |
| AAV-PAEC2 | 400 | US20150376607 SEQ ID NO: 56 |
| AAV-PAEC4 | 401 | US20150376607 SEQ ID NO: 22 |
| AAV-PAEC4 | 402 | US20150376607 SEQ ID NO: 55 |
| AAV-PAEC6 | 403 | US20150376607 SEQ ID NO: 23 |
| AAV-PAEC6 | 404 | US20150376607 SEQ ID NO: 52 |
| AAV-PAEC7 | 405 | US20150376607 SEQ ID NO: 24 |
| AAV-PAEC7 | 406 | US20150376607 SEQ ID NO: 53 |
| AAV-PAEC8 | 407 | US20150376607 SEQ ID NO: 25 |
| AAV-PAEC8 | 408 | US20150376607 SEQ ID NO: 50 |
| AAVpi.1 | 409 | US20150315612 SEQ ID NO: 28 |
| AAVpi.1 | 410 | US20150315612 SEQ ID NO: 93 |
| AAVpi.2 | 411 | US20150315612 SEQ ID NO: 30 |
| AAVpi.2 | 412 | US20150315612 SEQ ID NO: 95 |
| AAVpi.3 | 413 | US20150315612 SEQ ID NO: 29 |
| AAVpi.3 | 414 | US20150315612 SEQ ID NO: 94 |
| AAVrh.10 | 415 | US20150159173 SEQ ID NO: 9 |
| AAVrh.10 | 416 | US20150159173 SEQ ID NO: 25 |
| AAV44.2 | 417 | US20030138772 SEQ ID NO: 59 |
| AAVrh.10 (AAV44.2) | 418 | US20030138772 SEQ ID NO: 81 |
| AAV42.1B | 419 | US20030138772 SEQ ID NO: 90 |
| AAVrh.12 (AAV42.1b) | 420 | US20030138772 SEQ ID NO: 30 |
| AAVrh.13 | 421 | US20150159173 SEQ ID NO: 10 |
| AAVrh.13 | 422 | US20150159173 SEQ ID NO: 26 |
| AAVrh.13 | 423 | US20150315612 SEQ ID NO: 228 |
| AAVrh.13R | 424 | US20150159173 |
| AAV42.3A | 425 | US20030138772 SEQ ID NO: 87 |
| AAVrh.14 (AAV42.3a) | 426 | US20030138772 SEQ ID NO: 32 |
| AAV42.5A | 427 | US20030138772 SEQ ID NO: 89 |
| AAVrh.17 (AAV42.5a) | 428 | US20030138772 SEQ ID NO: 34 |
| AAV42.5B | 429 | US20030138772 SEQ ID NO: 91 |
| AAVrh.18 (AAV42.5b) | 430 | US20030138772 SEQ ID NO: 29 |
| AAV42.6B | 431 | US20030138772 SEQ ID NO: 112 |
| AAVrh.19 (AAV42.6b) | 432 | US20030138772 SEQ ID NO: 38 |
| AAVrh.2 | 433 | US20150159173 SEQ ID NO: 39 |
| AAVrh.2 | 434 | US20150315612 SEQ ID NO: 231 |
| AAVrh.20 | 435 | US20150159173 SEQ ID NO: 1 |
| AAV42.10 | 436 | US20030138772 SEQ ID NO: 106 |
| AAVrh.21 (AAV42.10) | 437 | US20030138772 SEQ ID NO: 35 |
| AAV42.11 | 438 | US20030138772 SEQ ID NO: 108 |
| AAVrh.22 (AAV42.11) | 439 | US20030138772 SEQ ID NO: 37 |
| AAV42.12 | 440 | US20030138772 SEQ ID NO: 113 |
| AAVrh.23 (AAV42.12) | 441 | US20030138772 SEQ ID NO: 58 |
| AAV42.13 | 442 | US20030138772 SEQ ID NO: 86 |
| AAVrh.24 (AAV42.13) | 443 | US20030138772 SEQ ID NO: 31 |
| AAV42.15 | 444 | US20030138772 SEQ ID NO: 84 |
| AAVrh.25 (AAV42.15) | 445 | US20030138772 SEQ ID NO: 28 |
| AAVrh.2R | 446 | US20150159173 |
| AAVrh.31 (AAV223.1) | 447 | US20030138772 SEQ ID NO: 48 |
| AAVC1 | 448 | US20030138772 SEQ ID NO: 60 |
| AAVrh.32 (AAVC1) | 449 | US20030138772 SEQ ID NO: 19 |
| AAVrh.32/33 | 450 | US20150159173 SEQ ID NO: 2 |
| AAVrh.33 (AAVC3) | 451 | US20030138772 SEQ ID NO: 20 |
| AAVC5 | 452 | US20030138772 SEQ ID NO: 62 |
| AAVrh.34 (AAVC5) | 453 | US20030138772 SEQ ID NO: 21 |
| AAVF1 | 454 | US20030138772 SEQ ID NO: 109 |
| AAVrh.35 (AAVF1) | 455 | US20030138772 SEQ ID NO: 22 |
| AAVF3 | 456 | US20030138772 SEQ ID NO: 111 |
| AAVrh.36 (AAVF3) | 457 | US20030138772 SEQ ID NO: 23 |
| AAVrh.37 | 458 | US20030138772 SEQ ID NO: 24 |
| AAVrh.37 | 459 | US20150159173 SEQ ID NO: 40 |
| AAVrh.37 | 460 | US20150315612 SEQ ID NO: 229 |
| AAVrh.37R2 | 461 | US20150159173 |
| AAVrh.38 (AAVLG-4) | 462 | US20150315612 SEQ ID NO: 7 |
| AAVrh.38 (AAVLG-4) | 463 | US20150315612 SEQ ID NO: 86 |
| AAVrh.39 | 464 | US20150159173 SEQ ID NO: 20, US20150315612 SEQ ID NO: 13 |
| AAVrh.39 | 465 | US20150159173 SEQ ID NO: 3, US20150159173 SEQ ID NO: 36, |
| | | US20150315612 SEQ ID NO: 89 |
| AAVrh.40 | 466 | US20150315612 SEQ ID NO: 92 |
| AAVrh.40 (AAVLG-10) | 467 | US20150315612 SEQ ID No: 14 |
| AAVrh.43 (AAVN721-8) | 468 | US20150315612 SEQ ID NO: 43, US20150159173 SEQ ID NO: 21 |
| AAVrh.43 (AAVN721-8) | 469 | US20150315612 SEQ ID NO: 163, US20150159173 SEQ ID NO: 37 |
| AAVrh.44 | 470 | US20150315612 SEQ ID NO: 34 |
| AAVrh.44 | 471 | US20150315612 SEQ ID NO: 111 |
| AAVrh.45 | 472 | US20150315612 SEQ ID NO: 41 |
| AAVrh.45 | 473 | US20150315612 SEQ ID NO: 109 |
| AAVrh.46 | 474 | US20150159173 SEQ ID NO: 22, US20150315612 SEQ ID NO: 19 |
| AAVrh.46 | 475 | US20150159173 SEQ ID NO: 4, US20150315612 SEQ ID NO: 101 |
| AAVrh.47 | 476 | US20150315612 SEQ ID NO: 38 |
| AAVrh.47 | 477 | US20150315612 SEQ ID NO: 118 |
| AAVrh.48 | 478 | US20150159173 SEQ ID NO: 44, US20150315612 SEQ ID NO: 115 |
| AAVrh.48.1 | 479 | US20150159173 |
| AAVrh.48.1.2 | 480 | US20150159173 |
| AAVrh.48.2 | 481 | US20150159173 |
| AAVrh.48 (AAV1-7) | 482 | US20150315612 SEQ ID NO: 32 |
| AAVrh.49 (AAV1-8) | 483 | US20150315612 SEQ ID NO: 25 |
| AAVrh.49 (AAV1-8) | 484 | US20150315612 SEQ ID NO: 103 |
| AAVrh.50 (AAV2-4) | 485 | US20150315612 SEQ ID NO: 23 |
| AAVrh.50 (AAV2-4) | 486 | US20150315612 SEQ ID NO: 108 |
| AAVrh.51 (AAV2-5) | 487 | US20150315612 SEQ ID No: 22 |
| AAVrh.51 (AAV2-5) | 488 | US20150315612 SEQ ID NO: 104 |
| AAVrh.52 (AAV3-9) | 489 | US20150315612 SEQ ID NO: 18 |
| AAVrh.52 (AAV3-9) | 490 | US20150315612 SEQ ID NO: 96 |
| AAVrh.53 | 491 | US20150315612 SEQ ID NO: 97 |
| AAVrh.53 (AAV3-11) | 492 | US20150315612 SEQ ID NO: 17 |
| AAVrh.53 (AAV3-11) | 493 | US20150315612 SEQ ID NO: 186 |
| AAVrh.54 | 494 | US20150315612 SEQ ID NO: 40 |
| AAVrh.54 | 495 | US20150159173 SEQ ID NO: 49, US20150315612 SEQ ID NO: 116 |
| AAVrh.55 | 496 | US20150315612 SEQ ID NO: 37 |
| AAVrh.55 (AAV4-19) | 497 | US20150315612 SEQ ID NO: 117 |
| AAVrh.56 | 498 | US20150315612 SEQ ID NO: 54 |
| AAVrh.56 | 499 | US20150315612 SEQ ID NO: 152 |
| AAVrh.57 | 500 | US20150315612 SEQ ID NO: 26 |
| AAVrh.57 | 501 | US20150315612 SEQ ID NO: 105 |
| AAVrh.58 | 502 | US20150315612 SEQ ID NO: 27 |
| AAVrh.58 | 503 | US20150159173 SEQ ID NO: 48, US20150315612 SEQ ID NO: 106 |
| AAVrh.58 | 504 | US20150315612 SEQ ID NO: 232 |
| AAVrh.59 | 505 | US20150315612 SEQ ID NO: 42 |
| AAVrh.59 | 506 | US20150315612 SEQ ID NO: 110 |
| AAVrh.60 | 507 | US20150315612 SEQ ID NO: 31 |
| AAVrh.60 | 508 | US20150315612 SEQ ID NO: 120 |
| AAVrh.61 | 509 | US20150315612 SEQ ID NO: 107 |
| AAVrh.61 (AAV2-3) | 510 | US20150315612 SEQ ID NO: 21 |
| AAVrh.62 (AAV2-15) | 511 | US20150315612 SEQ ID No: 33 |
| AAVrh.62 (AAV2-15) | 512 | US20150315612 SEQ ID NO: 114 |
| AAVrh.64 | 513 | US20150315612 SEQ ID No: 15 |
| AAVrh.64 | 514 | US20150159173 SEQ ID NO: 43, US20150315612 SEQ ID NO: 99 |
| AAVrh.64 | 515 | US20150315612 SEQ ID NO: 233 |
| AAVRh.64R1 | 516 | US20150159173 |
| AAVRh.64R2 | 517 | US20150159173 |
| AAVrh.65 | 518 | US20150315612 SEQ ID NO: 35 |
| AAVrh.65 | 519 | US20150315612 SEQ ID NO: 112 |
| AAVrh.67 | 520 | US20150315612 SEQ ID NO: 36 |
| AAVrh.67 | 521 | US20150315612 SEQ ID NO: 230 |
| AAVrh.67 | 522 | US20150159173 SEQ ID NO: 47, US20150315612 SEQ ID NO: 113 |
| AAVrh.68 | 523 | US20150315612 SEQ ID NO: 16 |
| AAVrh.68 | 524 | US20150315612 SEQ ID NO: 100 |
| AAVrh.69 | 525 | US20150315612 SEQ ID NO: 39 |
| AAVrh.69 | 526 | US20150315612 SEQ ID NO: 119 |
| AAVrh.70 | 527 | US20150315612 SEQ ID NO: 20 |
| AAVrh.70 | 528 | US20150315612 SEQ ID NO: 98 |
| AAVrh.71 | 529 | US20150315612 SEQ ID NO: 162 |
| AAVrh.72 | 530 | US20150315612 SEQ ID NO: 9 |
| AAVrh.73 | 531 | US20150159173 SEQ ID NO: 5 |
| AAVrh.74 | 532 | US20150159173 SEQ ID NO: 6 |
| AAVrh.8 | 533 | US20150159173 SEQ ID NO: 41 |
| AAVrh.8 | 534 | US20150315612 SEQ ID NO: 235 |
| AAVrh.8R | 535 | US20150159173, WO2015168666 SEQ ID NO: 9 |
| AAVrh.8R A586R | 536 | WO2015168666 SEQ ID NO: 10 |
| mutant | | |
| AAVrh.8R R533A | 537 | WO2015168666 SEQ ID NO: 11 |
| mutant | | |
| BAAV (bovine AAV) | 538 | U.S. Pat. No. 9,193,769 SEQ ID NO: 8 |
| BAAV (bovine AAV) | 539 | U.S. Pat. No. 9,193,769 SEQ ID NO: 10 |
| BAAV (bovine AAV) | 540 | U.S. Pat. No. 9,193,769 SEQ ID NO: 4 |
| BAAV (bovine AAV) | 541 | U.S. Pat. No. 9,193,769 SEQ ID NO: 2 |
| BAAV (bovine AAV) | 542 | U.S. Pat. No. 9,193,769 SEQ ID NO: 6 |
| BAAV (bovine AAV) | 543 | U.S. Pat. No. 9,193,769 SEQ ID NO: 1 |
| BAAV (bovine AAV) | 544 | U.S. Pat. No. 9,193,769 SEQ ID NO: 5 |
| BAAV (bovine AAV) | 545 | U.S. Pat. No. 9,193,769 SEQ ID NO: 3 |
| BAAV (bovine AAV) | 546 | U.S. Pat. No. 9,193,769 SEQ ID NO: 11 |
| BAAV (bovine AAV) | 547 | U.S. Pat. No. 7,427,396 SEQ ID NO: 5 |
| BAAV (bovine AAV) | 548 | U.S. Pat. No. 7,427,396 SEQ ID NO: 6 |
| BAAV (bovine AAV) | 549 | U.S. Pat. No. 9,193,769 SEQ ID NO: 7 |
| BAAV (bovine AAV) | 550 | U.S. Pat. No. 9,193,769 SEQ ID NO: 9 |
| BNP61 AAV | 551 | US20150238550 SEQ ID NO: 1 |
| BNP61 AAV | 552 | US20150238550 SEQ ID NO: 2 |
| BNP62 AAV | 553 | US20150238550 SEQ ID NO: 3 |
| BNP63 AAV | 554 | US20150238550 SEQ ID NO: 4 |
| caprine AAV | 555 | U.S. Pat. No. 7,427,396 SEQ ID NO: 3 |
| caprine AAV | 556 | U.S. Pat. No. 7,427,396 SEQ ID NO: 4 |
| true type AAV (ttAAV) | 557 | WO2015121501 SEQ ID NO: 2 |
| AAAV (Avian AAV) | 558 | U.S. Pat. No. 9,238,800 SEQ ID NO: 12 |
| AAAV (Avian AAV) | 559 | U.S. Pat. No. 9,238,800 SEQ ID NO: 2 |
| AAAV (Avian AAV) | 560 | U.S. Pat. No. 9,238,800 SEQ ID NO: 6 |
| AAAV (Avian AAV) | 561 | U.S. Pat. No. 9,238,800 SEQ ID NO: 4 |
| AAAV (Avian AAV) | 562 | U.S. Pat. No. 9,238,800 SEQ ID NO: 8 |
| AAAV (Avian AAV) | 563 | U.S. Pat. No. 9,238,800 SEQ ID NO: 14 |
| AAAV (Avian AAV) | 564 | U.S. Pat. No. 9,238,800 SEQ ID NO: 10 |
| AAAV (Avian AAV) | 565 | U.S. Pat. No. 9,238,800 SEQ ID NO: 15 |
| AAAV (Avian AAV) | 566 | U.S. Pat. No. 9,238,800 SEQ ID NO: 5 |
| AAAV (Avian AAV) | 567 | U.S. Pat. No. 9,238,800 SEQ ID NO: 9 |
| AAAV (Avian AAV) | 568 | U.S. Pat. No. 9,238,800 SEQ ID NO: 3 |
| AAAV (Avian AAV) | 569 | U.S. Pat. No. 9,238,800 SEQ ID NO: 7 |
| AAAV (Avian AAV) | 570 | U.S. Pat. No. 9,238,800 SEQ ID NO: 11 |
| AAAV (Avian AAV) | 571 | U.S. Pat. No. 9,238,800 SEQ ID NO: 13 |
| AAAV (Avian AAV) | 572 | U.S. Pat. No. 9,238,800 SEQ ID NO: 1 |
| AAV Shuffle 100-1 | 573 | US20160017295 SEQ ID NO: 23 |
| AAV Shuffle 100-1 | 574 | US20160017295 SEQ ID NO: 11 |
| AAV Shuffle 100-2 | 575 | US20160017295 SEQ ID NO: 37 |
| AAV Shuffle 100-2 | 576 | US20160017295 SEQ ID NO: 29 |
| AAV Shuffle 100-3 | 577 | US20160017295 SEQ ID NO: 24 |
| AAV Shuffle 100-3 | 578 | US20160017295 SEQ ID NO: 12 |
| AAV Shuffle 100-7 | 579 | US20160017295 SEQ ID NO: 25 |
| AAV Shuffle 100-7 | 580 | US20160017295 SEQ ID NO: 13 |
| AAV Shuffle 10-2 | 581 | US20160017295 SEQ ID NO: 34 |
| AAV Shuffle 10-2 | 582 | US20160017295 SEQ ID NO: 26 |
| AAV Shuffle 10-6 | 583 | US20160017295 SEQ ID NO: 35 |
| AAV Shuffle 10-6 | 584 | US20160017295 SEQ ID NO: 27 |
| AAV Shuffle 10-8 | 585 | US20160017295 SEQ ID NO: 36 |
| AAV Shuffle 10-8 | 586 | US20160017295 SEQ ID NO: 28 |
| AAV SM 100-10 | 587 | US20160017295 SEQ ID NO: 41 |
| AAV SM 100-10 | 588 | US20160017295 SEQ ID NO: 33 |
| AAV SM 100-3 | 589 | US20160017295 SEQ ID NO: 40 |
| AAV SM 100-3 | 590 | US20160017295 SEQ ID NO: 32 |
| AAV SM 10-1 | 591 | US20160017295 SEQ ID NO: 38 |
| AAV SM 10-1 | 592 | US20160017295 SEQ ID NO: 30 |
| AAV SM 10-2 | 593 | US20160017295 SEQ ID NO: 10 |
| AAV SM 10-2 | 594 | US20160017295 SEQ ID NO: 22 |
| AAV SM 10-8 | 595 | US20160017295 SEQ ID NO: 39 |
| AAV SM 10-8 | 596 | US20160017295 SEQ ID NO: 31 |
| AAV SM 100-10 | 587 | US20160017295 SEQ ID NO: 41 |
| AAV SM 100-10 | 588 | US20160017295 SEQ ID NO: 33 |
| AAV SM 100-3 | 589 | US20160017295 SEQ ID NO: 40 |
| AAV SM 100-3 | 590 | US20160017295 SEQ ID NO: 32 |
| AAV SM 10-1 | 591 | US20160017295 SEQ ID NO: 38 |
| AAV SM 10-1 | 592 | US20160017295 SEQ ID NO: 30 |
| AAV SM 10-2 | 593 | US20160017295 SEQ ID NO: 10 |
| AAV SM 10-2 | 594 | US20160017295 SEQ ID NO: 22 |
| AAV SM 10-8 | 595 | US20160017295 SEQ ID NO: 39 |
| AAV SM 10-8 | 596 | US20160017295 SEQ ID NO: 31 |
| AAVF1/HSC1 | 597 | WO2016049230 SEQ ID NO: 20 |
| AAVF2/HSC2 | 598 | WO2016049230 SEQ ID NO: 21 |
| AAVF3/HSC3 | 599 | WO2016049230 SEQ ID NO: 22 |
| AAVF4/HSC4 | 600 | WO2016049230 SEQ ID NO: 23 |
| AAVF5/HSC5 | 601 | WO2016049230 SEQ ID NO: 25 |
| AAVF6/HSC6 | 602 | WO2016049230 SEQ ID NO: 24 |
| AAVF7/HSC7 | 603 | WO2016049230 SEQ ID NO: 27 |
| AAVF8/HSC8 | 604 | WO2016049230 SEQ ID NO: 28 |
| AAVF9/HSC9 | 605 | WO2016049230 SEQ ID NO: 29 |
| AAVF11/HSC11 | 606 | WO2016049230 SEQ ID NO: 26 |
| AAVF12/HSC12 | 607 | WO2016049230 SEQ ID NO: 30 |
| AAVF13/HSC13 | 608 | WO2016049230 SEQ ID NO: 31 |
| AAVF14/HSC14 | 609 | WO2016049230 SEQ ID NO: 32 |
| AAVF15/HSC15 | 610 | WO2016049230 SEQ ID NO: 33 |
| AAVF16/HSC16 | 611 | WO2016049230 SEQ ID NO: 34 |
| AAVF17/HSC17 | 612 | WO2016049230 SEQ ID NO: 35 |
| AAVF1/HSC1 | 613 | WO2016049230 SEQ ID NO: 2 |
| AAVF2/HSC2 | 614 | WO2016049230 SEQ ID NO: 3 |
| AAVF3/HSC3 | 615 | WO2016049230 SEQ ID NO: 5 |
| AAVF4/HSC4 | 616 | WO2016049230 SEQ ID NO: 6 |
| AAVF5/HSC5 | 617 | WO2016049230 SEQ ID NO: 11 |
| AAVF6/HSC6 | 618 | WO2016049230 SEQ ID NO: 7 |
| AAVF7/HSC7 | 619 | WO2016049230 SEQ ID NO: 8 |
| AAVF8/HSC8 | 620 | WO2016049230 SEQ ID NO: 9 |
| AAVF9/HSC9 | 621 | WO2016049230 SEQ ID NO: 10 |
| AAVF11/HSC11 | 622 | WO2016049230 SEQ ID NO: 4 |
| AAVF12/HSC12 | 623 | WO2016049230 SEQ ID NO: 12 |
| AAVF13/HSC13 | 624 | WO2016049230 SEQ ID NO: 14 |
| AAVF14/HSC14 | 625 | WO2016049230 SEQ ID NO: 15 |
| AAVF15/HSC15 | 626 | WO2016049230 SEQ ID NO: 16 |
| AAVF16/HSC16 | 627 | WO2016049230 SEQ ID NO: 17 |
| AAVF17/HSC17 | 628 | WO2016049230 SEQ ID NO: 13 |
| AAV CBr-E1 | 629 | U.S. Pat. No. 8,734,809 SEQ ID NO: 13 |
| AAV CBr-E2 | 630 | U.S. Pat. No. 8,734,809 SEQ ID NO: 14 |
| AAV CBr-E3 | 631 | U.S. Pat. No. 8,734,809 SEQ ID NO: 15 |
| AAV CBr-E4 | 632 | U.S. Pat. No. 8,734,809 SEQ ID NO: 16 |
| AAV CBr-E5 | 633 | U.S. Pat. No. 8,734,809 SEQ ID NO: 17 |
| AAV CBr-e5 | 634 | U.S. Pat. No. 8,734,809 SEQ ID NO: 18 |
| AAV CBr-E6 | 635 | U.S. Pat. No. 8,734,809 SEQ ID NO: 19 |
| AAV CBr-E7 | 636 | U.S. Pat. No. 8,734,809 SEQ ID NO: 20 |
| AAV CBr-E8 | 637 | U.S. Pat. No. 8,734,809 SEQ ID NO: 21 |
| AAV CLv-D1 | 638 | U.S. Pat. No. 8,734,809 SEQ ID NO: 22 |
| AAV CLv-D2 | 639 | U.S. Pat. No. 8,734,809 SEQ ID NO: 23 |
| AAV CLv-D3 | 640 | U.S. Pat. No. 8,734,809 SEQ ID NO: 24 |
| AAV CLv-D4 | 641 | U.S. Pat. No. 8,734,809 SEQ ID NO: 25 |
| AAV CLv-D5 | 642 | U.S. Pat. No. 8,734,809 SEQ ID NO: 26 |
| AAV CLv-D6 | 643 | U.S. Pat. No. 8,734,809 SEQ ID NO: 27 |
| AAV CLv-D7 | 644 | U.S. Pat. No. 8,734,809 SEQ ID NO: 28 |
| AAV CLv-D8 | 645 | U.S. Pat. No. 8,734,809 SEQ ID NO: 29 |
| AAV CLv-E1 | 646 | U.S. Pat. No. 8,734,809 SEQ ID NO: 13 |
| AAV CLv-R1 | 647 | U.S. Pat. No. 8,734,809 SEQ ID NO: 30 |
| AAV CLv-R2 | 648 | U.S. Pat. No. 8,734,809 SEQ ID NO: 31 |
| AAV CLv-R3 | 649 | U.S. Pat. No. 8,734,809 SEQ ID NO: 32 |
| AAV CLv-R4 | 650 | U.S. Pat. No. 8,734,809 SEQ ID NO: 33 |
| AAV CLv-R5 | 651 | U.S. Pat. No. 8,734,809 SEQ ID NO: 34 |
| AAV CLv-R6 | 652 | U.S. Pat. No. 8,734,809 SEQ ID NO: 35 |
| AAV CLv-R7 | 653 | U.S. Pat. No. 8,734,809 SEQ ID NO: 36 |
| AAV CLv-R8 | 654 | U.S. Pat. No. 8,734,809 SEQ ID NO: 37 |
| AAV CLv-R9 | 655 | U.S. Pat. No. 8,734,809 SEQ ID NO: 38 |
| AAV CLg-F1 | 656 | U.S. Pat. No. 8,734,809 SEQ ID NO: 39 |
| AAV CLg-F2 | 657 | U.S. Pat. No. 8,734,809 SEQ ID NO: 40 |
| AAV CLg-F3 | 658 | U.S. Pat. No. 8,734,809 SEQ ID NO: 41 |
| AAV CLg-F4 | 659 | U.S. Pat. No. 8,734,809 SEQ ID NO: 42 |
| AAV CLg-F5 | 660 | U.S. Pat. No. 8,734,809 SEQ ID NO: 43 |
| AAV CLg-F6 | 661 | U.S. Pat. No. 8,734,809 SEQ ID NO: 43 |
| AAV CLg-F7 | 662 | U.S. Pat. No. 8,734,809 SEQ ID NO: 44 |
| AAV CLg-F8 | 663 | U.S. Pat. No. 8,734,809 SEQ ID NO: 43 |
| AAV CSp-1 | 664 | U.S. Pat. No. 8,734,809 SEQ ID NO: 45 |
| AAV CSp-10 | 665 | U.S. Pat. No. 8,734,809 SEQ ID NO: 46 |
| AAV CSp-11 | 666 | U.S. Pat. No. 8,734,809 SEQ ID NO: 47 |
| AAV CSp-2 | 667 | U.S. Pat. No. 8,734,809 SEQ ID NO: 48 |
| AAV CSp-3 | 668 | U.S. Pat. No. 8,734,809 SEQ ID NO: 49 |
| AAV CSp-4 | 669 | U.S. Pat. No. 8,734,809 SEQ ID NO: 50 |
| AAV CSp-6 | 670 | U.S. Pat. No. 8,734,809 SEQ ID NO: 51 |
| AAV CSp-7 | 671 | U.S. Pat. No. 8,734,809 SEQ ID NO: 52 |
| AAV CSp-8 | 672 | U.S. Pat. No. 8,734,809 SEQ ID NO: 53 |
| AAV CSp-9 | 673 | U.S. Pat. No. 8,734,809 SEQ ID NO: 54 |
| AAV CHt-2 | 674 | U.S. Pat. No. 8,734,809 SEQ ID NO: 55 |
| AAV CHt-3 | 675 | U.S. Pat. No. 8,734,809 SEQ ID NO: 56 |
| AAV CKd-1 | 676 | U.S. Pat. No. 8,734,809 SEQ ID NO: 57 |
| AAV CKd-10 | 677 | U.S. Pat. No. 8,734,809 SEQ ID NO: 58 |
| AAV CKd-2 | 678 | U.S. Pat. No. 8,734,809 SEQ ID NO: 59 |
| AAV CKd-3 | 679 | U.S. Pat. No. 8,734,809 SEQ ID NO: 60 |
| AAV CKd-4 | 680 | U.S. Pat. No. 8,734,809 SEQ ID NO: 61 |
| AAV CKd-6 | 681 | U.S. Pat. No. 8,734,809 SEQ ID NO: 62 |
| AAV CKd-7 | 682 | U.S. Pat. No. 8,734,809 SEQ ID NO: 63 |
| AAV CKd-8 | 683 | U.S. Pat. No. 8,734,809 SEQ ID NO: 64 |
| AAV CLv-1 | 684 | U.S. Pat. No. 8,734,809 SEQ ID NO: 65 |
| AAV CLv-12 | 685 | U.S. Pat. No. 8,734,809 SEQ ID NO: 66 |
| AAV CLv-13 | 686 | U.S. Pat. No. 8,734,809 SEQ ID NO: 67 |
| AAV CLv-2 | 687 | U.S. Pat. No. 8,734,809 SEQ ID NO: 68 |
| AAV CLv-3 | 688 | U.S. Pat. No. 8,734,809 SEQ ID NO: 69 |
| AAV CLv-4 | 689 | U.S. Pat. No. 8,734,809 SEQ ID NO: 70 |
| AAV CLv-6 | 690 | U.S. Pat. No. 8,734,809 SEQ ID NO: 71 |
| AAV CLv-8 | 691 | U.S. Pat. No. 8,734,809 SEQ ID NO: 72 |
| AAV CKd-B1 | 692 | U.S. Pat. No. 8,734,809 SEQ ID NO: 73 |
| AAV CKd-B2 | 693 | U.S. Pat. No. 8,734,809 SEQ ID NO: 74 |
| AAV CKd-B3 | 694 | U.S. Pat. No. 8,734,809 SEQ ID NO: 75 |
| AAV CKd-B4 | 695 | U.S. Pat. No. 8,734,809 SEQ ID NO: 76 |
| AAV CKd-B5 | 696 | U.S. Pat. No. 8,734,809 SEQ ID NO: 77 |
| AAV CKd-B6 | 697 | U.S. Pat. No. 8,734,809 SEQ ID NO: 78 |
| AAV CKd-B7 | 698 | U.S. Pat. No. 8,734,809 SEQ ID NO: 79 |
| AAV CKd-B8 | 699 | U.S. Pat. No. 8,734,809 SEQ ID NO: 80 |
| AAV CKd-H1 | 700 | U.S. Pat. No. 8,734,809 SEQ ID NO: 81 |
| AAV CKd-H2 | 701 | U.S. Pat. No. 8,734,809 SEQ ID NO: 82 |
| AAV CKd-H3 | 702 | U.S. Pat. No. 8,734,809 SEQ ID NO: 83 |
| AAV CKd-H4 | 703 | U.S. Pat. No. 8,734,809 SEQ ID NO: 84 |
| AAV CKd-H5 | 704 | U.S. Pat. No. 8,734,809 SEQ ID NO: 85 |
| AAV CKd-H6 | 705 | U.S. Pat. No. 8,734,809 SEQ ID NO: 77 |
| AAV CHt-1 | 706 | U.S. Pat. No. 8,734,809 SEQ ID NO: 86 |
| AAV CLv1-1 | 707 | U.S. Pat. No. 8,734,809 SEQ ID NO: 171 |
| AAV CLv1-2 | 708 | U.S. Pat. No. 8,734,809 SEQ ID NO: 172 |
| AAV CLv1-3 | 709 | U.S. Pat. No. 8,734,809 SEQ ID NO: 173 |
| AAV CLv1-4 | 710 | U.S. Pat. No. 8,734,809 SEQ ID NO: 174 |
| AAV Clv1-7 | 711 | U.S. Pat. No. 8,734,809 SEQ ID NO: 175 |
| AAV Clv1-8 | 712 | U.S. Pat. No. 8,734,809 SEQ ID NO: 176 |
| AAV Clv1-9 | 713 | U.S. Pat. No. 8,734,809 SEQ ID NO: 177 |
| AAV Clv1-10 | 714 | U.S. Pat. No. 8,734,809 SEQ ID NO: 178 |
| AAV.VR-355 | 715 | U.S. Pat. No. 8,734,809 SEQ ID NO: 181 |
| AAV.hu.48R3 | 716 | U.S. Pat. No. 8,734,809 SEQ ID NO: 183 |
| AAV CBr-E1 | 717 | U.S. Pat. No. 8,734,809 SEQ ID NO: 87 |
| AAV CBr-E2 | 718 | U.S. Pat. No. 8,734,809 SEQ ID NO: 88 |
| AAV CBr-E3 | 719 | U.S. Pat. No. 8,734,809 SEQ ID NO: 89 |
| AAV CBr-E4 | 720 | U.S. Pat. No. 8,734,809 SEQ ID NO: 90 |
| AAV CBr-E5 | 721 | U.S. Pat. No. 8,734,809 SEQ ID NO: 91 |
| AAV CBr-e5 | 722 | U.S. Pat. No. 8,734,809 SEQ ID NO: 92 |
| AAV CBr-E6 | 723 | U.S. Pat. No. 8,734,809 SEQ ID NO: 93 |
| AAV CBr-E7 | 724 | U.S. Pat. No. 8,734,809 SEQ ID NO: 94 |
| AAV CBr-E8 | 725 | U.S. Pat. No. 8,734,809 SEQ ID NO: 95 |
| AAV CLv-D1 | 726 | U.S. Pat. No. 8,734,809 SEQ ID NO: 96 |
| AAV CLv-D2 | 727 | U.S. Pat. No. 8,734,809 SEQ ID NO: 97 |
| AAV CLv-D3 | 728 | U.S. Pat. No. 8,734,809 SEQ ID NO: 98 |
| AAV CLv-D4 | 729 | U.S. Pat. No. 8,734,809 SEQ ID NO: 99 |
| AAV CLv-D5 | 730 | U.S. Pat. No. 8,734,809 SEQ ID NO: 100 |
| AAV CLv-D6 | 731 | U.S. Pat. No. 8,734,809 SEQ ID NO: 101 |
| AAV CLv-D7 | 732 | U.S. Pat. No. 8,734,809 SEQ ID NO: 102 |
| AAV CLv-D8 | 733 | U.S. Pat. No. 8,734,809 SEQ ID NO: 103 |
| AAV CLv-E1 | 734 | U.S. Pat. No. 8,734,809 SEQ ID NO: 87 |
| AAV CLv-R1 | 735 | U.S. Pat. No. 8,734,809 SEQ ID NO: 104 |
| AAV CLv-R2 | 736 | U.S. Pat. No. 8,734,809 SEQ ID NO: 105 |
| AAV CLv-R3 | 737 | U.S. Pat. No. 8,734,809 SEQ ID NO: 106 |
| AAV CLv-R4 | 738 | U.S. Pat. No. 8,734,809 SEQ ID NO: 107 |
| AAV CLv-R5 | 739 | U.S. Pat. No. 8,734,809 SEQ ID NO: 108 |
| AAV CLv-R6 | 740 | U.S. Pat. No. 8,734,809 SEQ ID NO: 109 |
| AAV CLv-R7 | 741 | U.S. Pat. No. 8,734,809 SEQ ID NO: 110 |
| AAV CLv-R8 | 742 | U.S. Pat. No. 8,734,809 SEQ ID NO: 111 |
| AAV CLv-R9 | 743 | U.S. Pat. No. 8,734,809 SEQ ID NO: 112 |
| AAV CLg-F1 | 744 | U.S. Pat. No. 8,734,809 SEQ ID NO: 113 |
| AAV CLg-F2 | 745 | U.S. Pat. No. 8,734,809 SEQ ID NO: 114 |
| AAV CLg-F3 | 746 | U.S. Pat. No. 8,734,809 SEQ ID NO: 115 |
| AAV CLg-F4 | 747 | U.S. Pat. No. 8,734,809 SEQ ID NO: 116 |
| AAV CLg-F5 | 748 | U.S. Pat. No. 8,734,809 SEQ ID NO: 117 |
| AAV CLg-F6 | 749 | U.S. Pat. No. 8,734,809 SEQ ID NO: 117 |
| AAV CLg-F7 | 750 | U.S. Pat. No. 8,734,809 SEQ ID NO: 118 |
| AAV CLg-F8 | 751 | U.S. Pat. No. 8,734,809 SEQ ID NO: 117 |
| AAV CSp-1 | 752 | U.S. Pat. No. 8,734,809 SEQ ID NO: 119 |
| AAV CSp-10 | 753 | U.S. Pat. No. 8,734,809 SEQ ID NO: 120 |
| AAV CSp-11 | 754 | U.S. Pat. No. 8,734,809 SEQ ID NO: 121 |
| AAV CSp-2 | 755 | U.S. Pat. No. 8,734,809 SEQ ID NO: 122 |
| AAV CSp-3 | 756 | U.S. Pat. No. 8,734,809 SEQ ID NO: 123 |
| AAV CSp-4 | 757 | U.S. Pat. No. 8,734,809 SEQ ID NO: 124 |
| AAV CSp-6 | 758 | U.S. Pat. No. 8,734,809 SEQ ID NO: 125 |
| AAV CSp-7 | 759 | U.S. Pat. No. 8,734,809 SEQ ID NO: 126 |
| AAV CSp-8 | 760 | U.S. Pat. No. 8,734,809 SEQ ID NO: 127 |
| AAV CSp-9 | 761 | U.S. Pat. No. 8,734,809 SEQ ID NO: 128 |
| AAV CHt-2 | 762 | U.S. Pat. No. 8,734,809 SEQ ID NO: 129 |
| AAV CHt-3 | 763 | U.S. Pat. No. 8,734,809 SEQ ID NO: 130 |
| AAV CKd-1 | 764 | U.S. Pat. No. 8,734,809 SEQ ID NO: 131 |
| AAV CKd-10 | 765 | U.S. Pat. No. 8,734,809 SEQ ID NO: 132 |
| AAV CKd-2 | 766 | U.S. Pat. No. 8,734,809 SEQ ID NO: 133 |
| AAV CKd-3 | 767 | U.S. Pat. No. 8,734,809 SEQ ID NO: 134 |
| AAV CKd-4 | 768 | U.S. Pat. No. 8,734,809 SEQ ID NO: 135 |
| AAV CKd-6 | 769 | U.S. Pat. No. 8,734,809 SEQ ID NO: 136 |
| AAV CKd-7 | 770 | U.S. Pat. No. 8,734,809 SEQ ID NO: 137 |
| AAV CKd-8 | 771 | U.S. Pat. No. 8,734,809 SEQ ID NO: 138 |
| AAV CLv-1 | 772 | U.S. Pat. No. 8,734,809 SEQ ID NO: 139 |
| AAV CLv-12 | 773 | U.S. Pat. No. 8,734,809 SEQ ID NO: 140 |
| AAV CLv-13 | 774 | U.S. Pat. No. 8,734,809 SEQ ID NO: 141 |
| AAV CLv-2 | 775 | U.S. Pat. No. 8,734,809 SEQ ID NO: 142 |
| AAV CLv-3 | 776 | U.S. Pat. No. 8,734,809 SEQ ID NO: 143 |
| AAV CLv-4 | 777 | U.S. Pat. No. 8,734,809 SEQ ID NO: 144 |
| AAV CLv-6 | 778 | U.S. Pat. No. 8,734,809 SEQ ID NO: 145 |
| AAV CLv-8 | 779 | U.S. Pat. No. 8,734,809 SEQ ID NO: 146 |
| AAV CKd-B1 | 780 | U.S. Pat. No. 8,734,809 SEQ ID NO: 147 |
| AAV CKd-B2 | 781 | U.S. Pat. No. 8,734,809 SEQ ID NO: 148 |
| AAV CKd-B3 | 782 | U.S. Pat. No. 8,734,809 SEQ ID NO: 149 |
| AAV CKd-B4 | 783 | U.S. Pat. No. 8,734,809 SEQ ID NO: 150 |
| AAV CKd-B5 | 784 | U.S. Pat. No. 8,734,809 SEQ ID NO: 151 |
| AAV CKd-B6 | 785 | U.S. Pat. No. 8,734,809 SEQ ID NO: 152 |
| AAV CKd-B7 | 786 | U.S. Pat. No. 8,734,809 SEQ ID NO: 153 |
| AAV CKd-B8 | 787 | U.S. Pat. No. 8,734,809 SEQ ID NO: 154 |
| AAV CKd-H1 | 788 | U.S. Pat. No. 8,734,809 SEQ ID NO: 155 |
| AAV CKd-H2 | 789 | U.S. Pat. No. 8,734,809 SEQ ID NO: 156 |
| AAV CKd-H3 | 790 | U.S. Pat. No. 8,734,809 SEQ ID NO: 157 |
| AAV CKd-H4 | 791 | U.S. Pat. No. 8,734,809 SEQ ID NO: 158 |
| AAV CKd-H5 | 792 | U.S. Pat. No. 8,734,809 SEQ ID NO: 159 |
| AAV CKd-H6 | 793 | U.S. Pat. No. 8,734,809 SEQ ID NO: 151 |
| AAV CHt-1 | 794 | U.S. Pat. No. 8,734,809 SEQ ID NO: 160 |
| AAV CHt-P2 | 795 | WO2016065001 SEQ ID NO: 1 |
| AAV CHt-P5 | 796 | WO2016065001 SEQ ID NO: 2 |
| AAV CHt-P9 | 797 | WO2016065001 SEQ ID NO: 3 |
| AAV CBr-7.1 | 798 | WO2016065001 SEQ ID NO: 4 |
| AAV CBr-7.2 | 799 | WO2016065001 SEQ ID NO: 5 |
| AAV CBr-7.3 | 800 | WO2016065001 SEQ ID NO: 6 |
| AAV CBr-7.4 | 801 | WO2016065001 SEQ ID NO: 7 |
| AAV CBr-7.5 | 802 | WO2016065001 SEQ ID NO: 8 |
| AAV CBr-7.7 | 803 | WO2016065001 SEQ ID NO: 9 |
| AAV CBr-7.8 | 804 | WO2016065001 SEQ ID NO: 10 |
| AAV CBr-7.10 | 805 | WO2016065001 SEQ ID NO: 11 |
| AAV CKd-N3 | 806 | WO2016065001 SEQ ID NO: 12 |
| AAV CKd-N4 | 807 | WO2016065001 SEQ ID NO: 13 |
| AAV CKd-N9 | 808 | WO2016065001 SEQ ID NO: 14 |
| AAV CLv-L4 | 809 | WO2016065001 SEQ ID NO: 15 |
| AAV CLv-L5 | 810 | WO2016065001 SEQ ID NO: 16 |
| AAV CLv-L6 | 811 | WO2016065001 SEQ ID NO: 17 |
| AAV CLv-K1 | 812 | WO2016065001 SEQ ID NO: 18 |
| AAV CLv-K3 | 813 | WO2016065001 SEQ ID NO: 19 |
| AAV CLv-K6 | 814 | WO2016065001 SEQ ID NO: 20 |
| AAV CLv-M1 | 815 | WO2016065001 SEQ ID NO: 21 |
| AAV CLv-M11 | 816 | WO2016065001 SEQ ID NO: 22 |
| AAV CLv-M2 | 817 | WO2016065001 SEQ ID NO: 23 |
| AAV CLv-M5 | 818 | WO2016065001 SEQ ID NO: 24 |
| AAV CLv-M6 | 819 | WO2016065001 SEQ ID NO: 25 |
| AAV CLv-M7 | 820 | WO2016065001 SEQ ID NO: 26 |
| AAV CLv-M8 | 821 | WO2016065001 SEQ ID NO: 27 |
| AAV CLv-M9 | 822 | WO2016065001 SEQ ID NO: 28 |
| AAV CHt-P1 | 823 | WO2016065001 SEQ ID NO: 29 |
| AAV CHt-P6 | 824 | WO2016065001 SEQ ID NO: 30 |
| AAV CHt-P8 | 825 | WO2016065001 SEQ ID NO: 31 |
| AAV CHt-6.1 | 826 | WO2016065001 SEQ ID NO: 32 |
| AAV CHt-6.10 | 827 | WO2016065001 SEQ ID NO: 33 |
| AAV CHt-6.5 | 828 | WO2016065001 SEQ ID NO: 34 |
| AAV CHt-6.6 | 829 | WO2016065001 SEQ ID NO: 35 |
| AAV CHt-6.7 | 830 | WO2016065001 SEQ ID NO: 36 |
| AAV CHt-6.8 | 831 | WO2016065001 SEQ ID NO: 37 |
| AAV CSp-8.10 | 832 | WO2016065001 SEQ ID NO: 38 |
| AAV CSp-8.2 | 833 | WO2016065001 SEQ ID NO: 39 |
| AAV CSp-8.4 | 834 | WO2016065001 SEQ ID NO: 40 |
| AAV CSp-8.5 | 835 | WO2016065001 SEQ ID NO: 41 |
| AAV CSp-8.6 | 836 | WO2016065001 SEQ ID NO: 42 |
| AAV CSp-8.7 | 837 | WO2016065001 SEQ ID NO: 43 |
| AAV CSp-8.8 | 838 | WO2016065001 SEQ ID NO: 44 |
| AAV CSp-8.9 | 839 | WO2016065001 SEQ ID NO: 45 |
| AAV CBr-B7.3 | 840 | WO2016065001 SEQ ID NO: 46 |
| AAV CBr-B7.4 | 841 | WO2016065001 SEQ ID NO: 47 |
| AAV3B | 842 | WO2016065001 SEQ ID NO: 48 |
| AAV4 | 843 | WO2016065001 SEQ ID NO: 49 |
| AAV5 | 844 | WO2016065001 SEQ ID NO: 50 |
| AAV CHt-P2 | 845 | WO2016065001 SEQ ID NO: 51 |
| AAV CHt-P5 | 846 | WO2016065001 SEQ ID NO: 52 |
| AAV CHt-P9 | 847 | WO2016065001 SEQ ID NO: 53 |
| AAV CBr-7.1 | 848 | WO2016065001 SEQ ID NO: 54 |
| AAV CBr-7.2 | 849 | WO2016065001 SEQ ID NO: 55 |
| AAV CBr-7.3 | 850 | WO2016065001 SEQ ID NO: 56 |
| AAV CBr-7.4 | 851 | WO2016065001 SEQ ID NO: 57 |
| AAV CBr-7.5 | 852 | WO2016065001 SEQ ID NO: 58 |
| AAV CBr-7.7 | 853 | WO2016065001 SEQ ID NO: 59 |
| AAV CBr-7.8 | 854 | WO2016065001 SEQ ID NO: 60 |
| AAV CBr-7.10 | 855 | WO2016065001 SEQ ID NO: 61 |
| AAV CKd-N3 | 856 | WO2016065001 SEQ ID NO: 62 |
| AAV CKd-N4 | 857 | WO2016065001 SEQ ID NO: 63 |
| AAV CKd-N9 | 858 | WO2016065001 SEQ ID NO: 64 |
| AAV CLv-L4 | 859 | WO2016065001 SEQ ID NO: 65 |
| AAV CLv-L5 | 860 | WO2016065001 SEQ ID NO: 66 |
| AAV CLv-L6 | 861 | WO2016065001 SEQ ID NO: 67 |
| AAV CLv-K1 | 862 | WO2016065001 SEQ ID NO: 68 |
| AAV CLv-K3 | 863 | WO2016065001 SEQ ID NO: 69 |
| AAV CLv-K6 | 864 | WO2016065001 SEQ ID NO: 70 |
| AAV CLv-M1 | 865 | WO2016065001 SEQ ID NO: 71 |
| AAV CLv-M11 | 866 | WO2016065001 SEQ ID NO: 72 |
| AAV CLv-M2 | 867 | WO2016065001 SEQ ID NO: 73 |
| AAV CLv-M5 | 868 | WO2016065001 SEQ ID NO: 74 |
| AAV CLv-M6 | 869 | WO2016065001 SEQ ID NO: 75 |
| AAV CLv-M7 | 870 | WO2016065001 SEQ ID NO: 76 |
| AAV CLv-M8 | 871 | WO2016065001 SEQ ID NO: 77 |
| AAV CLv-M9 | 872 | WO2016065001 SEQ ID NO: 78 |
| AAV CHt-P1 | 873 | WO2016065001 SEQ ID NO: 79 |
| AAV CHt-P6 | 874 | WO2016065001 SEQ ID NO: 80 |
| AAV CHt-P8 | 875 | WO2016065001 SEQ ID NO: 81 |
| AAV CHt-6.1 | 876 | WO2016065001 SEQ ID NO: 82 |
| AAV CHt-6.10 | 877 | WO2016065001 SEQ ID NO: 83 |
| AAV CHt-6.5 | 878 | WO2016065001 SEQ ID NO: 84 |
| AAV CHt-6.6 | 879 | WO2016065001 SEQ ID NO: 85 |
| AAV CHt-6.7 | 880 | WO2016065001 SEQ ID NO: 86 |
| AAV CHt-6.8 | 881 | WO2016065001 SEQ ID NO: 87 |
| AAV CSp-8.10 | 882 | WO2016065001 SEQ ID NO: 88 |
| AAV CSp-8.2 | 883 | WO2016065001 SEQ ID NO: 89 |
| AAV CSp-8.4 | 884 | WO2016065001 SEQ ID NO: 90 |
| AAV CSp-8.5 | 885 | WO2016065001 SEQ ID NO: 91 |
| AAV CSp-8.6 | 886 | WO2016065001 SEQ ID NO: 92 |
| AAV CSp-8.7 | 887 | WO2016065001 SEQ ID NO: 93 |
| AAV CSp-8.8 | 888 | WO2016065001 SEQ ID NO: 94 |
| AAV CSp-8.9 | 889 | WO2016065001 SEQ ID NO: 95 |
| AAV CBr-B7.3 | 890 | WO2016065001 SEQ ID NO: 96 |
| AAV CBr-B7.4 | 891 | WO2016065001 SEQ ID NO: 97 |
| AAV3B | 892 | WO2016065001 SEQ ID NO: 98 |
| AAV4 | 893 | WO2016065001 SEQ ID NO: 99 |
| AAV5 | 894 | WO2016065001 SEQ ID NO: 100 |
| AAVPHP.B or G2B-26 | 895 | WO2015038958 SEQ ID NO: 8 and 13; GenBankALU85156.1 |
| AAVPHP.B | 896 | WO2015038958 SEQ ID NO: 9 |
| AAVG2B-13 | 897 | WO2015038958 SEQ ID NO: 12 |
| AAVTH1.1-32 | 898 | WO2015038958 SEQ ID NO: 14 |
| AAVTH1.1-35 | 899 | WO2015038958 SEQ ID NO: 15 |

[0724] Each of the patents, applications and/or publications listed in Table 4 are hereby incorporated by reference in their entirety.

[0725] In one embodiment, the AAV serotype may be, or may have a sequence as described in International Patent Publication WO2015038958, the contents of which are herein incorporated by reference in their entirety, such as, but not limited to, AAV9 (SEQ ID NO: 2 and 11 of WO2015038958 or SEQ ID NO: 153 and 154 respectively herein), PHP.B (SEQ ID NO: 8 and 9 of WO2015038958, herein SEQ ID NO: 895 and 896), G2B-13 (SEQ ID NO: 12 of WO2015038958, herein SEQ ID NO: 897), G2B-26 (SEQ ID NO: 13 of WO2015038958, herein SEQ ID NO: 895 and 896), TH1.1-32 (SEQ ID NO: 14 of WO2015038958, herein SEQ ID NO: 898), TH1.1-35 (SEQ ID NO: 15 of WO2015038958, herein SEQ ID NO: 899) or variants thereof. Further, any of the targeting peptides or amino acid inserts described in WO2015038958, may be inserted into any parent AAV serotype, such as, but not limited to, AAV9 (SEQ ID NO: 153 for the DNA sequence and SEQ ID NO: 154 for the amino acid sequence). In one embodiment, the amino acid insert is inserted between amino acids 586-592 of the parent AAV (e.g., AAV9). In another embodiment, the amino acid insert is inserted between amino acids 588-589 of the parent AAV sequence. The amino acid insert may be, but is not limited to, any of the following amino acid sequences, TLAVPFK (SEQ ID NO: 1 of WO2015038958; herein SEQ ID NO: 900), KFPVALT (SEQ ID NO: 3 of WO2015038958; herein SEQ ID NO: 901), LAVPFK (SEQ ID NO: 31 of WO2015038958; herein SEQ ID NO: 902), AVPFK (SEQ ID NO: 32 of WO2015038958; herein SEQ ID NO: 903), VPFK (SEQ ID NO: 33 of WO2015038958; herein SEQ ID NO: 904), TLAVPF (SEQ ID NO: 34 of WO2015038958; herein SEQ ID NO: 905), TLAVP (SEQ ID NO: 35 of WO2015038958; herein SEQ ID NO: 906), TLAV (SEQ ID NO: 36 of WO2015038958; herein SEQ ID NO: 907), SVSKPFL (SEQ ID NO: 28 of WO2015038958; herein SEQ ID NO: 908), FTLTTPK (SEQ ID NO: 29 of WO2015038958; herein SEQ ID NO: 909), MNATKNV (SEQ ID NO: 30 of WO2015038958; herein SEQ ID NO: 910), QSSQTPR (SEQ ID NO: 54 of WO2015038958; herein SEQ ID NO: 911), ILGTGTS (SEQ ID NO: 55 of WO2015038958; herein SEQ ID NO: 912), TRTNPEA (SEQ ID NO: 56 of WO2015038958; herein SEQ ID NO: 913), NGGTSSS (SEQ ID NO: 58 of WO2015038958; herein SEQ ID NO: 914), or YTLSQGW (SEQ ID NO: 60 of WO2015038958; herein SEQ ID NO: 915). Non-limiting examples of nucleotide sequences that may encode the amino acid inserts include the following, AAGTTTCCTGTGGCGTTGACT (for SEQ ID NO: 3 of WO2015038958; herein SEQ ID NO: 916), ACTTTGGCGGTGCCTTTTAAG (SEQ ID NO: 24 and 49 of WO2015038958; herein SEQ ID NO: 917), AGTGTGAGTAAGCCTTTTTTG (SEQ ID NO: 25 of WO2015038958; herein SEQ ID NO: 918), TTTACGTTGACGACGCCTAAG (SEQ ID NO: 26 of WO2015038958; herein SEQ ID NO: 919), ATGAATGCTACGAAGAATGTG (SEQ ID NO: 27 of WO2015038958; herein SEQ ID NO: 920), CAGTCGTCGCAGACGCCTAGG (SEQ ID NO: 48 of WO2015038958; herein SEQ ID NO: 921), ATTCTGGGGACTGGTACTTCG (SEQ ID NO: 50 and 52 of WO2015038958; herein SEQ ID NO: 922), ACGCGGACTAATCCTGAGGCT (SEQ ID NO: 51 of WO2015038958; herein SEQ ID NO: 923), AATGGGGGGACTAGTAGTTCT (SEQ ID NO: 53 of WO2015038958; herein SEQ ID NO: 924), or TATACTTTGTCGCAGGGTTGG (SEQ ID NO: 59 of WO2015038958; herein SEQ ID NO: 925).

[0726] In one embodiment, the AAV serotype may be engineered to comprise at least one AAV capsid CD8+ T-cell epitope. Hui et al. (Molecular Therapy—Methods & Clinical Development (2015) 2, 15029 doi:10.1038/mtm.2015.29; the contents of which are herein incorporated by reference in its entirety) identified AAV capsid-specific CD8+ T-cell epitopes for AAV1 and AAV2 (see e.g., Table 2 in the publication). As a non-limiting example, the capsid-specific CD8+ T-cell epitope may be for an AAV2 serotype. As a non-limiting example, the capsid-specific CD8+ T-cell epitope may be for an AAV1 serotype.

[0727] In one embodiment, the AAV serotype may be engineered to comprise at least one AAV capsid CD8+ T-cell epitope for AAV2 such as, but not limited to, SADNNNSEY (SEQ ID NO: 926), LIDQYLYYL (SEQ ID NO: 927), VPQYGYLTL (SEQ ID NO: 928), TTSTRTWAL (SEQ ID NO: 929), YHLNGRDSL (SEQ ID NO: 930), SQAVGRSSF (SEQ ID NO: 931), VPANPSTTF (SEQ ID NO: 932), FPQSGVLIF (SEQ ID NO: 933), YFDFNRFHCHFSPRD (SEQ ID NO: 934), VGNSSGNWHCDSTWM (SEQ ID NO: 935), QFSQAGASDIRDQSR (SEQ ID NO: 936), GASDIRQSRNWLP (SEQ ID NO: 937) and GNRQAATADVNTQGV (SEQ ID NO: 938).

[0728] In one embodiment, the AAV serotype may be engineered to comprise at least one AAV capsid CD8+ T-cell epitope for AAV1 such as, but not limited to, LDRLMNPLI (SEQ ID NO: 939), TTSTRTWAL (SEQ ID NO: 929), and QPAKKRLNF (SEQ ID NO: 940)).

[0729] In one embodiment, peptides for inclusion in an AAV serotype may be identified using the methods described by Hui et al. (Molecular Therapy—Methods & Clinical Development (2015) 2, 15029 doi:10.1038/mtm.2015.29; the contents of which are herein incorporated by reference in its entirety). As a non-limiting example, the procedure includes isolating human splenocytes, restimulating the splenocytes in vitro using individual peptides spanning the amino acid sequence of the AAV capsid protein, IFN-gamma ELISpot with the individual peptides used for the in vitro restimulation, bioinformatics analysis to determine the HLA restriction of 15-mers identified by IFN-gamma ELISpot, identification of candidate reactive 9-mer epitopes for a given HLA allele, synthesis candidate 9-mers, second IFN-gamma ELISpot screening of splenocytes from subjects carrying the HLA alleles to which identified AAV epitopes are predicted to bind, determine the AAV capsid-reactive CD8+ T cell epitopes and determine the frequency of subjects reacting to a given AAV epitope.

[0730] In one embodiment, the AAV may be a serotype generated by Cre-recombination-based AAV targeted evolution (CREATE) as described by Deverman et al., (Nature Biotechnology 34(2):204-209 (2016)), the contents of which are herein incorporated by reference in their entirety. In one embodiment, AAV serotypes generated in this manner have improved CNS transduction and/or neuronal and astrocytic tropism, as compared to other AAV serotypes. As non-limiting examples, the AAV serotype may be PHP.B, PHP.B2, PHP.B3, PHP.A, G2A12, G2A15. In one embodiment, these AAV serotypes may be AAV9 (SEQ ID NO: 153 and 154) derivatives with a 7-amino acid insert between amino acids 588-589. Non-limiting examples of these 7-amino acid inserts include TLAVPFK (SEQ ID NO: 900), SVSKPFL (SEQ ID NO: 908), FTLTTPK (SEQ ID NO: 909), YTLSQGW (SEQ ID NO: 915), QAVRTSL (SEQ ID NO: 941) and/or LAKERLS (SEQ ID NO: 942).

[0731] In one embodiment, the AAV serotype may be as described in Jackson et al (Frontiers in Molecular Neuroscience 9:154 (2016)), the contents of which are herein incorporated by reference in their entirety. In some embodiments, the AAV serotype is PHP.B or AAV9. In some embodiments, the AAV serotype is paired with a synapsin promoter to enhance neuronal transduction, as compared to when more ubiquitous promoters are used (i.e., CBA or CMV).

[0732] In one embodiment, peptides for inclusion in an AAV serotype may be identified by isolating human splenocytes, restimulating the splenocytes in vitro using individual peptides spanning the amino acid sequence of the AAV capsid protein, IFN-gamma ELISpot with the individual peptides used for the in vitro restimulation, bioinformatics analysis to determine the given allele restriction of 15-mers identified by IFN-gamma ELISpot, identification of candidate reactive 9-mer epitopes for a given allele, synthesis candidate 9-mers, second IFN-gamma ELISpot screening of splenocytes from subjects carrying the specific alleles to which identified AAV epitopes are predicted to bind, determine the AAV capsid-reactive CD8+ T cell epitopes and determine the frequency of subjects reacting to a given AAV epitope.

[0733] AAV vectors comprising the nucleic acid sequence for the siRNA molecules may be prepared or derived from various serotypes of AAVs, including, but not limited to, AAV1, AAV2, AAV3, AAV4, AAV5, AAV6, AAV7, AAV8, AAV9, AAV9.47, AAV9(hul4), AAV10, AAV11, AAV12, AAVrh8, AAVrh10, AAV-DJ8, AAV-DJ, AAV-PHP.A, and/or AAV-PHP.B. In some cases, different serotypes of AAVs may be mixed together or with other types of viruses to produce chimeric AAV vectors. As a non-limiting example, the AAV vector is derived from the AAV9 serotype.

### Viral Genome Component: Inverted Terminal Repeats (ITRs)

[0734] The AAV particles of the present invention comprise a viral genome with at least one ITR region and a payload region. In one embodiment the viral genome has two ITRs. These two ITRs flank the payload region at the 5′ and 3′ ends. The ITRs function as origins of replication comprising recognition sites for replication. ITRs comprise sequence regions which can be complementary and symmetrically arranged. ITRs incorporated into viral genomes of the invention may be comprised of naturally occurring polynucleotide sequences or recombinantly derived polynucleotide sequences.

[0735] The ITRs may be derived from the same serotype as the capsid, selected from any of the serotypes listed in Table 6, or a derivative thereof. The ITR may be of a different serotype than the capsid. In one embodiment the AAV particle has more than one ITR. In a non-limiting example, the AAV particle has a viral genome comprising two ITRs. In one embodiment the ITRs are of the same serotype as one another. In another embodiment the ITRs are of different serotypes. Non-limiting examples include zero, one or both of the ITRs having the same serotype as the capsid. In one embodiment both ITRs of the viral genome of the AAV particle are AAV2 ITRs.

[0736] Independently, each ITR may be about 100 to about 150 nucleotides in length. An ITR may be about 100-105 nucleotides in length, 106-110 nucleotides in length, 111-115 nucleotides in length, 116-120 nucleotides in length, 121-125 nucleotides in length, 126-130 nucleotides in length, 131-135 nucleotides in length, 136-140 nucleotides in length, 141-145 nucleotides in length or 146-150 nucleotides in length. In one embodiment the ITRs are 140-142 nucleotides in length. Non limiting examples of ITR length are 102, 140, 141, 142, 145 nucleotides in length, and those having at least 95% identity thereto.

[0737] In one embodiment, the encoded siRNA molecule may be located near the 5′ end of the flip ITR in an expression vector. In another embodiment, the encoded siRNA molecule may be located near the 3′ end of the flip ITR in an expression vector. In yet another embodiment, the encoded siRNA molecule may be located near the 5′ end of the flop ITR in an expression vector. In yet another embodiment, the encoded siRNA molecule may be located near the 3′ end of the flop ITR in an expression vector. In one embodiment, the encoded siRNA molecule may be located between the 5′ end of the flip ITR and the 3′ end of the flop ITR in an expression vector. In one embodiment, the encoded siRNA molecule may be located between (e.g., half-way between the 5′ end of the flip ITR and 3′ end of the flop ITR or the 3′ end of the flop ITR and the 5′ end of the flip ITR), the 3′ end of the flip ITR and the 5′ end of the flip ITR in an expression vector. As a non-limiting example, the encoded siRNA molecule may be located within 1, 2, 3, 4, 5, 6, 7, 8, 9, 10, 11, 12, 13, 14, 15, 16, 17, 18, 19, 20, 21, 22, 23, 24, 25, 26, 27, 28, 29, 30 or more than 30 nucleotides downstream from the 5′ or 3′ end of an ITR (e.g., Flip or Flop ITR) in an expression vector. As a non-limiting example, the encoded siRNA molecule may be located within 1, 2, 3, 4, 5, 6, 7, 8, 9, 10, 11, 12, 13, 14, 15, 16, 17, 18, 19, 20, 21, 22, 23, 24, 25, 26, 27, 28, 29, 30 or more than 30 nucleotides upstream from the 5′ or 3′ end of an ITR (e.g., Flip or Flop ITR) in an expression vector. As another non-limiting example, the encoded siRNA molecule may be located within 1-5, 1-10, 1-15, 1-20, 1-25, 1-30, 5-10, 5-15, 5-20, 5-25, 5-30, 10-15, 10-20, 10-25, 10-30, 15-20, 15-25, 15-30, 20-25, 20-30 or 25-30 nucleotides downstream from the 5′ or 3′ end of an ITR (e.g., Flip or Flop ITR) in an expression vector. As another non-limiting example, the encoded siRNA molecule may be located within 1-5, 1-10, 1-15, 1-20, 1-25, 1-30, 5-10, 5-15, 5-20, 5-25, 5-30, 10-15, 10-20, 10-25, 10-30, 15-20, 15-25, 15-30, 20-25, 20-30 or 25-30 upstream from the 5′ or 3′ end of an ITR (e.g., Flip or Flop ITR) in an expression vector. As a non-limiting example, the encoded siRNA molecule may be located within the first 1%, 2%, 3%, 4%, 5%, 6%, 7%, 8%, 9%, 10%, 15%, 20%, 25% or more than 25% of the nucleotides upstream from the 5′ or 3′ end of an ITR (e.g., Flip or Flop ITR) in an expression vector. As another non-limiting example, the encoded siRNA molecule may be located with the first 1-5%, 1-10%, 1-15%, 1-20%, 1-25%, 5-10%, 5-15%, 5-20%, 5-25%, 10-15%, 10-20%, 10-25%, 15-20%, 15-25%, or 20-25% downstream from the 5′ or 3′ end of an ITR (e.g., Flip or Flop ITR) in an expression vector.

### Viral Genome Component: Promoters

[0738] A person skilled in the art may recognize that a target cell may require a specific promoter including but not limited to a promoter that is species specific, inducible, tissue-specific, or cell cycle-specific (Parr et al., Nat. Med.3:1145-9 (1997); the contents of which are herein incorporated by reference in its entirety).

[0739] In one embodiment, the promoter is a promoter deemed to be efficient to drive the expression of the modulatory polynucleotide.

[0740] In one embodiment, the promoter is a promoter having a tropism for the cell being targeted.

[0741] In one embodiment, the promoter is a weak promoter which provides expression of a payload e.g., a modulatory polynucleotide, e.g., siRNA or dsRNA, for a period of time in targeted tissues such as, but not limited to, nervous system tissues. Expression may be for a period of 1 hour, 2, hours, 3 hours, 4 hours, 5 hours, 6 hours, 7 hours, 8 hours, 9 hours, 10 hours, 11 hours, 12 hours, 13 hours, 14 hours, 15 hours, 16 hours, 17 hours, 18 hours, 19 hours, 20 hours, 21 hours, 22 hours, 23 hours, 1 day, 2 days, 3 days, 4 days, 5 days, 6 days, 1 week, 8 days, 9 days, 10 days, 11 days, 12 days, 13 days, 2 weeks, 15 days, 16 days, 17 days, 18 days, 19 days, 20 days, 3 weeks, 22 days, 23 days, 24 days, 25 days, 26 days, 27 days, 28 days, 29 days, 30 days, 31 days, 1 month, 2 months, 3 months, 4 months, 5 months, 6 months, 7 months, 8 months, 9 months, 10 months, 11 months, 1 year, 13 months, 14 months, 15 months, 16 months, 17 months, 18 months, 19 months, 20 months, 21 months, 22 months, 23 months, 2 years, 3 years, 4 years, 5 years, 6 years, 7 years, 8 years, 9 years, 10 years or more than 10 years. Expression may be for 1-5 hours, 1-12 hours, 1-2 days, 1-5 days, 1-2 weeks, 1-3 weeks, 1-4 weeks, 1-2 months, 1-4 months, 1-6 months, 2-6 months, 3-6 months, 3-9 months, 4-8 months, 6-12 months, 1-2 years, 1-5 years, 2-5 years, 3-6 years, 3-8 years, 4-8 years or 5-10 years. As a non-limiting example, the promoter is a weak promoter for sustained expression of a payload in nervous tissues.

[0742] In one embodiment, the promoter may be a promoter which is less than 1 kb. The promoter may have a length of 200, 210, 220, 230, 240, 250, 260, 270, 280, 290, 300, 310, 320, 330, 340, 350, 360, 370, 380, 390, 400, 410, 420, 430, 440, 450, 460, 470, 480, 490, 500, 510, 520, 530, 540, 550, 560, 570, 580, 590, 600, 610, 620, 630, 640, 650, 660, 670, 680, 690, 700, 710, 720, 730, 740, 750, 760, 770, 780, 790, 800 or more than 800. The promoter may have a length between 200-300, 200-400, 200-500, 200-600, 200-700, 200-800, 300-400, 300-500, 300-600, 300-700, 300-800, 400-500, 400-600, 400-700, 400-800, 500-600, 500-700, 500-800, 600-700, 600-800 or 700-800.

[0743] In one embodiment, the promoter may be a combination of two or more components such as, but not limited to, CMV and CBA. Each component may have a length of 200, 210, 220, 230, 240, 250, 260, 270, 280, 290, 300, 310, 320, 330, 340, 350, 360, 370, 380, 381, 382, 383, 384, 385, 386, 387, 388, 389, 390, 400, 410, 420, 430, 440, 450, 460, 470, 480, 490, 500, 510, 520, 530, 540, 550, 560, 570, 580, 590, 600, 610, 620, 630, 640, 650, 660, 670, 680, 690, 700, 710, 720, 730, 740, 750, 760, 770, 780, 790, 800 or more than 800. Each component may have a length between 200-300, 200-400, 200-500, 200-600, 200-700, 200-800, 300-400, 300-500, 300-600, 300-700, 300-800, 400-500, 400-600, 400-700, 400-800, 500-600, 500-700, 500-800, 600-700, 600-800 or 700-800. As a non-limiting example, the promoter is a combination of a 382 nucleotide CMV-enhancer sequence and a 260 nucleotide CBA-promoter sequence.

[0744] In one embodiment, the vector genome comprises at least one element to enhance the target specificity and expression (See e.g., Powell et al. Viral Expression Cassette Elements to Enhance Transgene Target Specificity and Expression in Gene Therapy, 2015; the contents of which are herein incorporated by reference in its entirety). Non-limiting examples of elements to enhance the transgene target specificity and expression include promoters, endogenous miRNAs, post-transcriptional regulatory elements (PREs), polyadenylation (PolyA) signal sequences and upstream enhancers (USEs), CMV enhancers and introns.

[0745] In one embodiment, the vector genome comprises at least one element to enhance the target specificity and expression (See e.g., Powell et al. Viral Expression Cassette Elements to Enhance Transgene Target Specificity and Expression in Gene Therapy, 2015; the contents of which are herein incorporated by reference in its entirety) such as promoters.

[0746] Promoters for which promote expression in most tissues include, but are not limited to, human elongation factor 1α-subunit (EF1α), immediate-early cytomegalovirus (CMV), chicken β-actin (CBA) and its derivative CAG, the β glucuronidase (GUSB), or ubiquitin C (UBC). Tissue-specific expression elements can be used to restrict expression to certain cell types such as, but not limited to, nervous system promoters which can be used to restrict expression to neurons, astrocytes, or oligodendrocytes. Non-limiting example of tissue-specific expression elements for neurons include neuron-specific enolase (NSE), platelet-derived growth factor (PDGF), platelet-derived growth factor B-chain (PDGF-β), the synapsin (Syn), the methyl-CpG binding protein 2 (MeCP2), CaMKII, mGluR2, NFL, NFH, nβ2, PPE, Enk and EAAT2 promoters. A non-limiting example of tissue-specific expression elements for astrocytes include the glial fibrillary acidic protein (GFAP) and EAAT2 promoters. A non-limiting example of a tissue-specific expression element for oligodendrocytes include the myelin basic protein (MBP) promoter.

[0747] In one embodiment, the vector genome comprises a ubiquitous promoter. Non-limiting examples of ubiquitous promoters include H1, U6, CMV, CBA (including derivatives CAG, CBh, etc.), EF-1α, PGK, UBC, GUSB (hGBp), and UCOE (promoter of HNRPA2B1-CBX3). Yu et al. (Molecular Pain 2011, 7:63; the contents of which are herein incorporated by reference in its entirety) evaluated the expression of eGFP under the CAG, EFIα, PGK and UBC promoters in rat DRG cells and primary DRG cells using lentiviral vectors and found that UBC showed weaker expression than the other 3 promoters and there was only 10-12% glia expression seen for all promoters. Soderblom et al. (E. Neuro 2015; the contents of which are herein incorporated by reference in its entirety) the expression of eGFP in AAV8 with CMV and UBC promoters and AAV2 with the CMV promoter after injection in the motor cortex. Intranasal administration of a plasmid containing a UBC or EFIα promoter showed a sustained airway expression greater than the expression with the CMV promoter (See e.g., Gill et al., Gene Therapy 2001, Vol. 8, 1539-1546; the contents of which are herein incorporated by reference in its entirety). Husain et al. (Gene Therapy 2009; the contents of which are herein incorporated by reference in its entirety) evaluated a HOH construct with a hGUSB promoter, a HSV-1LAT promoter and a NSE promoter and found that the HOH construct showed weaker expression than NSE in mice brain. Passini and Wolfe (J. Virol. 2001, 12382-12392, the contents of which are herein incorporated by reference in its entirety) evaluated the long term effects of the HOH vector following an intraventricular injection in neonatal mice and found that there was sustained expression for at least 1 year. Low expression in all brain regions was found by Xu et al. (Gene Therapy 2001, 8, 1323-1332; the contents of which are herein incorporated by reference in its entirety) when NF-L and NF-H promoters were used as compared to the CMV-lacZ, CMV-luc, EF, GFAP, hENK, nAChR, PPE, PPE+wpre, NSE (0.3 kb), NSE (1.8 kb) and NSE (1.8 kb+wpre). Xu et al. found that the promoter activity in descending order was NSE (1.8 kb), EF, NSE (0.3 kb), GFAP, CMV, hENK, PPE, NFL and NFH. NFL is a 650 nucleotide promoter and NFH is a 920 nucleotide promoter which are both absent in the liver but NFH is abundant in the sensory proprioceptive neurons, brain and spinal cord and NFH is present in the heart. Scn8a is a 470 nucleotide promoter which expresses throughout the DRG, spinal cord and brain with particularly high expression seen in the hippocampal neurons and cerebellar Purkinje cells, cortex, thalamus and hypothalamus (See e.g., Drews et al. 2007 and Raymond et al. 2004; the contents of each of which are herein incorporated by reference in their entireties).

[0748] In one embodiment, the vector genome comprises an UBC promoter. The UBC promoter may have a size of 300-350 nucleotides. As a non-limiting example, the UBC promoter is 332 nucleotides.

[0749] In one embodiment, the vector genome comprises a GUSB promoter. The GUSB promoter may have a size of 350-400 nucleotides. As a non-limiting example, the GUSB promoter is 378 nucleotides. As a non-limiting example, the construct may be AAV-promoter-CMV/globin intron-modulatory polynucleotide-RBG, where the AAV may be self-complementary and the AAV may be the DJ serotype.

[0750] In one embodiment, the vector genome comprises a NFL promoter. The NFL promoter may have a size of 600-700 nucleotides. As a non-limiting example, the NFL promoter is 650 nucleotides. As a non-limiting example, the construct may be AAV-promoter-CMV/globin intron-modulatory polynucleotide-RBG, where the AAV may be self-complementary and the AAV may be the DJ serotype.

[0751] In one embodiment, the vector genome comprises a NFH promoter. The NFH promoter may have a size of 900-950 nucleotides. As a non-limiting example, the NFH promoter is 920 nucleotides. As a non-limiting example, the construct may be AAV-promoter-CMV/globin intron-modulatory polynucleotide-RBG, where the AAV may be self-complementary and the AAV may be the DJ serotype.

[0752] In one embodiment, the vector genome comprises a scn8a promoter. The scn8a promoter may have a size of 450-500 nucleotides. As a non-limiting example, the scn8a promoter is 470 nucleotides. As a non-limiting example, the construct may be AAV-promoter-CMV/globin intron-modulatory polynucleotide-RBG, where the AAV may be self-complementary and the AAV may be the DJ serotype.

[0753] In one embodiment, the vector genome comprises a FXN promoter.

[0754] In one embodiment, the vector genome comprises a PGK promoter.

[0755] In one embodiment, the vector genome comprises a CBA promoter.

[0756] In one embodiment, the vector genome comprises a CMV promoter.

[0757] In one embodiment, the vector genome comprises a H1 promoter.

[0758] In one embodiment, the vector genome comprises a U6 promoter.

[0759] In one embodiment, the vector genome comprises a liver or a skeletal muscle promoter. Non-limiting examples of liver promoters include hAAT and TBG. Non-limiting examples of skeletal muscle promoters include Desmin, MCK and C5-12.

[0760] In one embodiment, the AAV vector comprises an enhancer element, a promoter and/or a 5′UTR intron. The enhancer may be, but is not limited to, a CMV enhancer, the promoter may be, but is not limited to, a CMV, CBA, UBC, GUSB, NSE, Synapsin, MeCP2, and GFAP promoter and the 5′UTR/intron may be, but is not limited to, SV40, and CBA-MVM. As a non-limiting example, the enhancer, promoter and/or intron used in combination may be: (1) CMV enhancer, CMV promoter, SV40 5′UTR intron; (2) CMV enhancer, CBA promoter, SV 40 5′UTR intron; (3) CMV enhancer, CBA promoter, CBA-MVM 5′UTR intron; (4) UBC promoter; (5) GUSB promoter; (6) NSE promoter; (7) Synapsin promoter; (8) MeCP2 promoter; (9) GFAP promoter, (10) H1 promoter; and (11) U6 promoter.

[0761] In one embodiment, the AAV vector has an engineered promoter.

### Viral Genome Component: Introns

[0762] In one embodiment, the vector genome comprises at least one element to enhance the transgene target specificity and expression (See e.g., Powell et al. Viral Expression Cassette Elements to Enhance Transgene Target Specificity and Expression in Gene Therapy, 2015; the contents of which are herein incorporated by reference in its entirety) such as an intron. Non-limiting examples of introns include, MVM (67-97 bps), F.IX truncated intron 1 (300 bps), β-globin SD/immunoglobulin heavy chain splice acceptor (250 bps), adenovirus splice donor/immunoglobin splice acceptor (500 bps), SV40 late splice donor/splice acceptor (19S/16S) (180 bps) and hybrid adenovirus splice donor/IgG splice acceptor (230 bps).

[0763] In one embodiment, the intron may be 100-500 nucleotides in length. The intron may have a length of 80, 90, 100, 110, 120, 130, 140, 150, 160, 170, 171, 172, 173, 174, 175, 176, 177, 178, 179, 180, 190, 200, 210, 220, 230, 240, 250, 260, 270, 280, 290, 300, 310, 320, 330, 340, 350, 360, 370, 380, 390, 400, 410, 420, 430, 440, 450, 460, 470, 480, 490 or 500. The promoter may have a length between 80-100, 80-120, 80-140, 80-160, 80-180, 80-200, 80-250, 80-300, 80-350, 80-400, 80-450, 80-500, 200-300, 200-400, 200-500, 300-400, 300-500, or 400-500.

[0764] In one embodiment, the AAV vector may comprise an SV40 intron or fragment or variant thereof. As a non-limiting example, the promoter may be CMV. As another non-limiting example, the promoter may be CBA. As yet another non-limiting example, the promoter may be H1.

[0765] In one embodiment, the AAV vector may comprise a beta-globin intron or a fragment or variant thereof. As a non-limiting example, the promoter may be CMV. As another non-limiting example, the promoter may be CBA. As yet another non-limiting example, the promoter may be H1.

[0766] In one embodiment, the encoded siRNA molecule may be located downstream of an intron in an expression vector such as, but not limited to, SV40 intron or beta globin intron or others known in the art. Further, the encoded siRNA molecule may also be located upstream of the polyadenylation sequence in an expression vector. As a non-limiting example, the encoded siRNA molecule may be located within 1, 2, 3, 4, 5, 6, 7, 8, 9, 10, 11, 12, 13, 14, 15, 16, 17, 18, 19, 20, 21, 22, 23, 24, 25, 26, 27, 28, 29, 30 or more than 30 nucleotides downstream from the promoter with an intron and/or upstream of the polyadenylation sequence in an expression vector. As another non-limiting example, the encoded siRNA molecule may be located within 1-5, 1-10, 1-15, 1-20, 1-25, 1-30, 5-10, 5-15, 5-20, 5-25, 5-30, 10-15, 10-20, 10-25, 10-30, 15-20, 15-25, 15-30, 20-25, 20-30 or 25-30 nucleotides downstream from the intron and/or upstream of the polyadenylation sequence in an expression vector. As a non-limiting example, the encoded siRNA molecule may be located within the first 1%, 2%, 3%, 4%, 5%, 6%, 7%, 8%, 9%, 10%, 15%, 20%, 25% or more than 25% of the nucleotides downstream from the intron and/or upstream of the polyadenylation sequence in an expression vector. As another non-limiting example, the encoded siRNA molecule may be located with the first 1-5%, 1-10%, 1-15%, 1-20%, 1-25%, 5-10%, 5-15%, 5-20%, 5-25%, 10-15%, 10-20%, 10-25%, 15-20%, 15-25%, or 20-25% of the sequence downstream from the intron and/or upstream of the polyadenylation sequence in an expression vector.

### Viral Genome Component: Polyadenylation Sequence

[0767] In one embodiment, the viral genome of the AAV particles of the present invention comprise at least one polyadenylation sequence. The viral genome of the AAV particle may comprise a polyadenylation sequence between the 3′ end of the payload coding sequence and the 5′ end of the 3′ITR.

[0768] In one embodiment, the polyadenylation sequence or “polyA sequence” may range from absent to about 500 nucleotides in length. The polyadenylation sequence may be, but is not limited to, 1, 2, 3, 4, 5, 6, 7, 8, 9, 10, 11, 12, 13, 14, 15, 16, 17, 18, 19, 20, 21, 22, 23, 24, 25, 26, 27, 28, 29, 30, 31, 32, 33, 34, 35, 36, 37, 38, 39, 40, 41, 42, 43, 44, 45, 46, 47, 48, 49, 50, 51, 52, 53, 54, 55, 56, 57, 58, 59, 60, 61, 62, 63, 64, 65, 66, 67, 68, 69, 70, 71, 72, 73, 74, 75, 76, 77, 78, 79, 80, 81, 82, 83, 84, 85, 86, 87, 88, 89, 90, 91, 92, 93, 94, 95, 96, 97, 98, 99, 100, 101, 102, 103, 104, 105, 106, 107, 108, 109, 110, 111, 112, 113, 114, 115, 116, 117, 118, 119, 120, 121, 122, 123, 124, 125, 126, 127, 128, 129, 130, 131, 132, 133, 134, 135, 136, 137, 138, 139, 140, 141, 142, 143, 144, 145, 146, 147, 148, 149, 150, 151, 152, 153, 154, 155, 156, 157, 158, 159, 160, 161, 162, 163, 164, 165, 166, 167, 168, 169, 170, 171, 172, 173, 174, 175, 176, 177, 178, 179, 180, 181, 182, 183, 184, 185, 186, 187, 188, 189, 190, 191, 192, 193, 194, 195, 196, 197, 198, 199, 200, 201, 202, 203, 204, 205, 206, 207, 208, 209, 210, 211, 212, 213, 214, 215, 216, 217, 218, 219, 220, 221, 222, 223, 224, 225, 226, 227, 228, 229, 230, 231, 232, 233, 234, 235, 236, 237, 238, 239, 240, 241, 242, 243, 244, 245, 246, 247, 248, 249, 250, 251, 252, 253, 254, 255, 256, 257, 258, 259, 260, 261, 262, 263, 264, 265, 266, 267, 268, 269, 270, 271, 272, 273, 274, 275, 276, 277, 278, 279, 280, 281, 282, 283, 284, 285, 286, 287, 288, 289, 290, 291, 292, 293, 294, 295, 296, 297, 298, 299, 300, 301, 302, 303, 304, 305, 306, 307, 308, 309, 310, 311, 312, 313, 314, 315, 316, 317, 318, 319, 320, 321, 322, 323, 324, 325, 326, 327, 328, 329, 330, 331, 332, 333, 334, 335, 336, 337, 338, 339, 340, 341, 342, 343, 344, 345, 346, 347, 348, 349, 350, 351, 352, 353, 354, 355, 356, 357, 358, 359, 360, 361, 362, 363, 364, 365, 366, 367, 368, 369, 370, 371, 372, 373, 374, 375, 376, 377, 378, 379, 380, 381, 382, 383, 384, 385, 386, 387, 388, 389, 390, 391, 392, 393, 394, 395, 396, 397, 398, 399, 400, 401, 402, 403, 404, 405, 406, 407, 408, 409, 410, 411, 412, 413, 414, 415, 416, 417, 418, 419, 420, 421, 422, 423, 424, 425, 426, 427, 428, 429, 430, 431, 432, 433, 434, 435, 436, 437, 438, 439, 440, 441, 442, 443, 444, 445, 446, 447, 448, 449, 450, 451, 452, 453, 454, 455, 456, 457, 458, 459, 460, 461, 462, 463, 464, 465, 466, 467, 468, 469, 470, 471, 472, 473, 474, 475, 476, 477, 478, 479, 480, 481, 482, 483, 484, 485, 486, 487, 488, 489, 490, 491, 492, 493, 494, 495, 496, 497, 498, 499, and 500 nucleotides in length.

[0769] In one embodiment, the polyadenylation sequence is 50-100 nucleotides in length.

[0770] In one embodiment, the polyadenylation sequence is 50-150 nucleotides in length.

[0771] In one embodiment, the polyadenylation sequence is 50-160 nucleotides in length.

[0772] In one embodiment, the polyadenylation sequence is 50-200 nucleotides in length.

[0773] In one embodiment, the polyadenylation sequence is 60-100 nucleotides in length.

[0774] In one embodiment, the polyadenylation sequence is 60-150 nucleotides in length.

[0775] In one embodiment, the polyadenylation sequence is 60-160 nucleotides in length.

[0776] In one embodiment, the polyadenylation sequence is 60-200 nucleotides in length.

[0777] In one embodiment, the polyadenylation sequence is 70-100 nucleotides in length.

[0778] In one embodiment, the polyadenylation sequence is 70-150 nucleotides in length.

[0779] In one embodiment, the polyadenylation sequence is 70-160 nucleotides in length.

[0780] In one embodiment, the polyadenylation sequence is 70-200 nucleotides in length.

[0781] In one embodiment, the polyadenylation sequence is 80-100 nucleotides in length.

[0782] In one embodiment, the polyadenylation sequence is 80-150 nucleotides in length.

[0783] In one embodiment, the polyadenylation sequence is 80-160 nucleotides in length.

[0784] In one embodiment, the polyadenylation sequence is 80-200 nucleotides in length.

[0785] In one embodiment, the polyadenylation sequence is 90-100 nucleotides in length.

[0786] In one embodiment, the polyadenylation sequence is 90-150 nucleotides in length.

[0787] In one embodiment, the polyadenylation sequence is 90-160 nucleotides in length.

[0788] In one embodiment, the polyadenylation sequence is 90-200 nucleotides in length.

[0789] In one embodiment, the encoded siRNA molecule may be located upstream of the polyadenylation sequence in an expression vector. Further, the encoded siRNA molecule may be located downstream of a promoter such as, but not limited to, CMV, U6, H1, CBA or a CBA promoter with a SV40 or a human betaglobin intron in an expression vector. As a non-limiting example, the encoded siRNA molecule may be located within 1, 2, 3, 4, 5, 6, 7, 8, 9, 10, 11, 12, 13, 14, 15, 16, 17, 18, 19, 20, 21, 22, 23, 24, 25, 26, 27, 28, 29, 30 or more than 30 nucleotides downstream from the promoter and/or upstream of the polyadenylation sequence in an expression vector. As another non-limiting example, the encoded siRNA molecule may be located within 1-5, 1-10, 1-15, 1-20, 1-25, 1-30, 5-10, 5-15, 5-20, 5-25, 5-30, 10-15, 10-20, 10-25, 10-30, 15-20, 15-25, 15-30, 20-25, 20-30 or 25-30 nucleotides downstream from the promoter and/or upstream of the polyadenylation sequence in an expression vector. As a non-limiting example, the encoded siRNA molecule may be located within the first 1%, 2%, 3%, 4%, 5%, 6%, 7%, 8%, 9%, 10%, 15%, 20%, 25% or more than 25% of the nucleotides downstream from the promoter and/or upstream of the polyadenylation sequence in an expression vector. As another non-limiting example, the encoded siRNA molecule may be located with the first 1-5%, 1-10%, 1-15%, 1-20%, 1-25%, 5-10%, 5-15%, 5-20%, 5-25%, 10-15%, 10-20%, 10-25%, 15-20%, 15-25%, or 20-25% downstream from the promoter and/or upstream of the polyadenylation sequence in an expression vector.

### Expression Vector

[0790] In one embodiment, an expression vector (e.g., AAV vector) may comprise at least one of the modulatory polynucleotides encoding at least one of the siRNA sequences or duplexes described herein.

[0791] In one embodiment, an expression vector may comprise, from ITR to ITR recited 5′ to 3′, an ITR, a promoter, an intron, a modulatory polynucleotide, a polyA sequence and an ITR.

### Genome Size

[0792] In one embodiment, the vector genome which comprises a nucleic acid sequence encoding the modulatory polynucleotides described herein may be single stranded or double stranded vector genome. The size of the vector genome may be small, medium, large or the maximum size. Additionally, the vector genome may comprise a promoter and a polyA tail.

[0793] In one embodiment, the vector genome which comprises a nucleic acid sequence encoding the modulatory polynucleotides described herein may be a small single stranded vector genome. A small single stranded vector genome may be 2.7 to 3.5 kb in size such as about 2.7, 2.8, 2.9, 3.0, 3.1, 3.2, 3.3, 3.4, and 3.5 kb in size. As a non-limiting example, the small single stranded vector genome may be 3.2 kb in size. Additionally, the vector genome may comprise a promoter and a polyA tail.

[0794] In one embodiment, the vector genome which comprises a nucleic acid sequence encoding the modulatory polynucleotides described herein may be a small double stranded vector genome. A small double stranded vector genome may be 1.3 to 1.7 kb in size such as about 1.3, 1.4, 1.5, 1.6, and 1.7 kb in size. As a non-limiting example, the small double stranded vector genome may be 1.6 kb in size. Additionally, the vector genome may comprise a promoter and a polyA tail.

[0795] In one embodiment, the vector genome which comprises a nucleic acid sequence encoding the modulatory polynucleotides described herein e.g., siRNA or dsRNA, may be a medium single stranded vector genome. A medium single stranded vector genome may be 3.6 to 4.3 kb in size such as about 3.6, 3.7, 3.8, 3.9, 4.0, 4.1, 4.2 and 4.3 kb in size. As a non-limiting example, the medium single stranded vector genome may be 4.0 kb in size. Additionally, the vector genome may comprise a promoter and a polyA tail.

[0796] In one embodiment, the vector genome which comprises a nucleic acid sequence encoding the modulatory polynucleotides described herein may be a medium double stranded vector genome. A medium double stranded vector genome may be 1.8 to 2.1 kb in size such as about 1.8, 1.9, 2.0, and 2.1 kb in size. As a non-limiting example, the medium double stranded vector genome may be 2.0 kb in size. Additionally, the vector genome may comprise a promoter and a polyA tail.

[0797] In one embodiment, the vector genome which comprises a nucleic acid sequence encoding the modulatory polynucleotides described herein may be a large single stranded vector genome. A large single stranded vector genome may be 4.4 to 6.0 kb in size such as about 4.4, 4.5, 4.6, 4.7, 4.8, 4.9, 5.0, 5.1, 5.2, 5.3, 5.4, 5.5, 5.6, 5.7, 5.8, 5.9 and 6.0 kb in size. As a non-limiting example, the large single stranded vector genome may be 4.7 kb in size. As another non-limiting example, the large single stranded vector genome may be 4.8 kb in size. As yet another non-limiting example, the large single stranded vector genome may be 6.0 kb in size. Additionally, the vector genome may comprise a promoter and a polyA tail.

[0798] In one embodiment, the vector genome which comprises a nucleic acid sequence encoding the modulatory polynucleotides described herein may be a large double stranded vector genome. A large double stranded vector genome may be 2.2 to 3.0 kb in size such as about 2.2, 2.3, 2.4, 2.5, 2.6, 2.7, 2.8, 2.9 and 3.0 kb in size. As a non-limiting example, the large double stranded vector genome may be 2.4 kb in size. Additionally, the vector genome may comprise a promoter and a polyA tail.

### Viral Production

[0799] The present disclosure provides a method for the generation of parvoviral particles, e.g. AAV particles, by viral genome replication in a viral replication cell comprising contacting the viral replication cell with an AAV polynucleotide or AAV genome.

[0800] The present disclosure provides a method for producing an AAV particle having enhanced (increased, improved) transduction efficiency comprising the steps of: 1) co-transfecting competent bacterial cells with a bacmid vector and either a viral construct vector and/or AAV payload construct vector, 2) isolating the resultant viral construct expression vector and AAV payload construct expression vector and separately transfecting viral replication cells, 3) isolating and purifying resultant payload and viral construct particles comprising viral construct expression vector or AAV payload construct expression vector, 4) co-infecting a viral replication cell with both the AAV payload and viral construct particles comprising viral construct expression vector or AAV payload construct expression vector, 5) harvesting and purifying the viral particle comprising a parvoviral genome.

[0801] In one embodiment, the present invention provides a method for producing an AAV particle comprising the steps of 1) simultaneously co-transfecting mammalian cells, such as, but not limited to HEK293 cells, with a payload region, a construct expressing rep and cap genes and a helper construct, 2) harvesting and purifying the AAV particle comprising a viral genome.

### Cells

[0802] The present disclosure provides a cell comprising an AAV polynucleotide and/or AAV genome.

[0803] Viral production disclosed herein describes processes and methods for producing AAV particles that contact a target cell to deliver a payload construct, e.g. a recombinant viral construct, which comprises a nucleotide encoding a payload molecule.

[0804] In one embodiment, the AAV particles may be produced in a viral replication cell that comprises an insect cell.

[0805] Growing conditions for insect cells in culture, and production of heterologous products in insect cells in culture are well-known in the art, see U.S. Pat. No. 6,204,059, the contents of which are herein incorporated by reference in their entirety.

[0806] Any insect cell which allows for replication of parvovirus and which can be maintained in culture can be used in accordance with the present invention. Cell lines may be used from Spodoptera frugiperda, including, but not limited to the Sf9 or Sf21 cell lines, Drosophila cell lines, or mosquito cell lines, such as Aedes albopictus derived cell lines. Use of insect cells for expression of heterologous proteins is well documented, as are methods of introducing nucleic acids, such as vectors, e.g., insect-cell compatible vectors, into such cells and methods of maintaining such cells in culture. See, for example, Methods in Molecular Biology, ed. Richard, Humana Press, NJ (1995); O'Reilly et al., Baculovirus Expression Vectors, A Laboratory Manual, Oxford Univ. Press (1994); Samulski et al., J. Vir.63:3822-8 (1989); Kajigaya et al., Proc. Nat'l. Acad. Sci. USA 88: 4646-50 (1991); Ruffing et al., J. Vir. 66:6922-30 (1992); Kimbauer et al., Vir.219:37-44 (1996); Zhao et al., Vir.272:382-93 (2000); and Samulski et al., U.S. Pat. No. 6,204,059, the contents of each of which is herein incorporated by reference in its entirety.

[0807] The viral replication cell may be selected from any biological organism, including prokaryotic (e.g., bacterial) cells, and eukaryotic cells, including, insect cells, yeast cells and mammalian cells. Viral replication cells may comprise mammalian cells such as A549, WEH1, 3T3, 10T1/2, BHK, MDCK, COS 1, COS 7, BSC 1, BSC 40, BMT 10, VERO. W138, HeLa, HEK293, Saos, C2C12, L cells, HT1080, HepG2 and primary fibroblast, hepatocyte and myoblast cells derived from mammals. Viral replication cells comprise cells derived from mammalian species including, but not limited to, human, monkey, mouse, rat, rabbit, and hamster or cell type, including but not limited to fibroblast, hepatocyte, tumor cell, cell line transformed cell, etc.

### Small Scale Production of AAV Particles

[0808] Viral production disclosed herein describes processes and methods for producing AAV particles that contact a target cell to deliver a payload, e.g. a recombinant viral construct, which comprises a nucleotide encoding a payload.

[0809] In one embodiment, the AAV particles may be produced in a viral replication cell that comprises a mammalian cell.

[0810] Viral replication cells commonly used for production of recombinant AAV particles include, but are not limited to 293 cells, COS cells, HeLa cells, KB cells, and other mammalian cell lines as described in U.S. Pat. Nos. 6,156,303, 5,387,484, 5,741,683, 5,691,176, and 5,688,676; U.S. patent application 2002/0081721, and International Patent Applications WO 00/47757, WO 00/24916, and WO 96/17947, the contents of each of which are herein incorporated by reference in their entireties.

[0811] In one embodiment, AAV particles are produced in mammalian-cells wherein all three VP proteins are expressed at a stoichiometry approaching 1:1:10 (VP1:VP2:VP3). The regulatory mechanisms that allow this controlled level of expression include the production of two mRNAs, one for VP1, and the other for VP2 and VP3, produced by differential splicing.

[0812] In another embodiment, AAV particles are produced in mammalian cells using a triple transfection method wherein a payload construct, parvoviral Rep and parvoviral Cap and a helper construct are comprised within three different constructs. The triple transfection method of the three components of AAV particle production may be utilized to produce small lots of virus for assays including transduction efficiency, target tissue (tropism) evaluation, and stability.

### Baculovirus

[0813] Particle production disclosed herein describes processes and methods for producing AAV particles that contact a target cell to deliver a payload construct which comprises a nucleotide encoding a payload.

[0814] Briefly, the viral construct vector and the AAV payload construct vector are each incorporated by a transposon donor/acceptor system into a bacmid, also known as a baculovirus plasmid, by standard molecular biology techniques known and performed by a person skilled in the art. Transfection of separate viral replication cell populations produces two baculoviruses, one that comprises the viral construct expression vector, and another that comprises the AAV payload construct expression vector. The two baculoviruses may be used to infect a single viral replication cell population for production of AAV particles.

[0815] Baculovirus expression vectors for producing viral particles in insect cells, including but not limited to Spodoptera frugiperda (Sf9) cells, provide high titers of viral particle product. Recombinant baculovirus encoding the viral construct expression vector and AAV payload construct expression vector initiates a productive infection of viral replicating cells. Infectious baculovirus particles released from the primary infection secondarily infect additional cells in the culture, exponentially infecting the entire cell culture population in a number of infection cycles that is a function of the initial multiplicity of infection, see Urabe, M. et al., J Virol. 2006 February; 80 (4):1874-85, the contents of which are herein incorporated by reference in their entirety.

[0816] Production of AAV particles with baculovirus in an insect cell system may address known baculovirus genetic and physical instability. In one embodiment, the production system addresses baculovirus instability over multiple passages by utilizing a titerless infected-cells preservation and scale-up system. Small scale seed cultures of viral producing cells are transfected with viral expression constructs encoding the structural, non-structural, components of the viral particle. Baculovirus-infected viral producing cells are harvested into aliquots that may be cryopreserved in liquid nitrogen; the aliquots retain viability and infectivity for infection of large scale viral producing cell culture Wasilko D J et al., Protein Expr Purif. 2009 June; 65(2):122-32, the contents of which are herein incorporated by reference in their entirety.

[0817] A genetically stable baculovirus may be used to produce source of the one or more of the components for producing AAV particles in invertebrate cells. In one embodiment, defective baculovirus expression vectors may be maintained episomally in insect cells. In such an embodiment the bacmid vector is engineered with replication control elements, including but not limited to promoters, enhancers, and/or cell-cycle regulated replication elements.

[0818] In one embodiment, baculoviruses may be engineered with a (non-) selectable marker for recombination into the chitinase/cathepsin locus. The chia/v-cath locus is non-essential for propagating baculovirus in tissue culture, and the V-cath (EC 3.4.22.50) is a cysteine endoprotease that is most active on Arg-Arg dipeptide containing substrates. The Arg-Arg dipeptide is present in densovirus and parvovirus capsid structural proteins but infrequently occurs in dependovirus VP1.

[0819] In one embodiment, stable viral replication cells permissive for baculovirus infection are engineered with at least one stable integrated copy of any of the elements necessary for AAV replication and viral particle production including, but not limited to, the entire AAV genome, Rep and Cap genes, Rep genes, Cap genes, each Rep protein as a separate transcription cassette, each VP protein as a separate transcription cassette, the AAP (assembly activation protein), or at least one of the baculovirus helper genes with native or non-native promoters.

### Large-Scale Production

[0820] In some embodiments, AAV particle production may be modified to increase the scale of production. Large scale viral production methods according to the present disclosure may include any of those taught in U.S. Pat. Nos. 5,756,283, 6,258,595, 6,261,551, 6,270,996, 6,281,010, 6,365,394, 6,475,769, 6,482,634, 6,485,966, 6,943,019, 6,953,690, 7,022,519, 7,238,526, 7,291,498 and 7,491,508 or International Publication Nos. WO1996039530, WO1998010088, WO1999014354, WO1999015685, WO1999047691, WO2000055342, WO2000075353 and WO2001023597, the contents of each of which are herein incorporated by reference in their entirety. Methods of increasing viral particle production scale typically comprise increasing the number of viral replication cells. In some embodiments, viral replication cells comprise adherent cells. To increase the scale of viral particle production by adherent viral replication cells, larger cell culture surfaces are required. In some cases, large-scale production methods comprise the use of roller bottles to increase cell culture surfaces. Other cell culture substrates with increased surface areas are known in the art. Examples of additional adherent cell culture products with increased surface areas include, but are not limited to CellSTACK®, CellCube® (Corning Corp., Corning, NY) and Nunc™ Cell Factory™ (Thermo Scientific, Waltham, MA.) In some cases, large-scale adherent cell surfaces may comprise from about 1,000 cm2 to about 100,000 cm2. In some cases, large-scale adherent cell cultures may comprise from about 107 to about 109 cells, from about 108 to about 1010 cells, from about 109 to about 1012 cells or at least 1012 cells. In some cases, large-scale adherent cultures may produce from about 109 to about 1012, from about 1010 to about 1013, from about 1011 to about 1014, from about 1012 to about 1015 or at least 1015 viral particles.

[0821] In some embodiments, large-scale viral production methods of the present disclosure may comprise the use of suspension cell cultures. Suspension cell culture allows for significantly increased numbers of cells. Typically, the number of adherent cells that can be grown on about 10-50 cm2 of surface area can be grown in about 1 cm3 volume in suspension.

[0822] Transfection of replication cells in large-scale culture formats may be carried out according to any methods known in the art. For large-scale adherent cell cultures, transfection methods may include, but are not limited to the use of inorganic compounds (e.g. calcium phosphate), organic compounds [e.g. polyethyleneimine (PEI)] or the use of non-chemical methods (e.g. electroporation.) With cells grown in suspension, transfection methods may include, but are not limited to the use of calcium phosphate and the use of PEI. In some cases, transfection of large scale suspension cultures may be carried out according to the section entitled “Transfection Procedure” described in Feng, L. et al., 2008. Biotechnol Appl. Biochem. 50:121-32, the contents of which are herein incorporated by reference in their entirety. According to such embodiments, PEI-DNA complexes may be formed for introduction of plasmids to be transfected. In some cases, cells being transfected with PEI-DNA complexes may be ‘shocked’ prior to transfection. This comprises lowering cell culture temperatures to 4° C. for a period of about 1 hour. In some cases, cell cultures may be shocked for a period of from about 10 minutes to about 5 hours. In some cases, cell cultures may be shocked at a temperature of from about 0° C. to about 20° C.

[0823] In some cases, transfections may include one or more vectors for expression of an RNA effector molecule to reduce expression of nucleic acids from one or more AAV payload construct. Such methods may enhance the production of viral particles by reducing cellular resources wasted on expressing payload constructs. In some cases, such methods may be carried according to those taught in US Publication No. US2014/0099666, the contents of which are herein incorporated by reference in their entirety.

### Bioreactors

[0824] In some embodiments, cell culture bioreactors may be used for large scale viral production. In some cases, bioreactors comprise stirred tank reactors. Such reactors generally comprise a vessel, typically cylindrical in shape, with a stirrer (e.g. impeller.) In some embodiments, such bioreactor vessels may be placed within a water jacket to control vessel temperature and/or to minimize effects from ambient temperature changes. Bioreactor vessel volume may range in size from about 500 ml to about 2 L, from about 1 L to about 5 L, from about 2.5 L to about 20 L, from about 10 L to about 50 L, from about 25 L to about 100 L, from about 75 L to about 500 L, from about 250 L to about 2,000 L, from about 1,000 L to about 10,000 L, from about 5,000 L to about 50,000 L or at least 50,000 L. Vessel bottoms may be rounded or flat. In some cases, animal cell cultures may be maintained in bioreactors with rounded vessel bottoms.

[0825] In some cases, bioreactor vessels may be warmed through the use of a thermocirculator. Thermocirculators pump heated water around water jackets. In some cases, heated water may be pumped through pipes (e.g. coiled pipes) that are present within bioreactor vessels. In some cases, warm air may be circulated around bioreactors, including, but not limited to air space directly above culture medium. Additionally, pH and CO2 levels may be maintained to optimize cell viability.

[0826] In some cases, bioreactors may comprise hollow-fiber reactors. Hollow-fiber bioreactors may support the culture of both anchorage dependent and anchorage independent cells. Further bioreactors may include, but are not limited to packed-bed or fixed-bed bioreactors. Such bioreactors may comprise vessels with glass beads for adherent cell attachment. Further packed-bed reactors may comprise ceramic beads.

[0827] In some cases, viral particles are produced through the use of a disposable bioreactor. In some embodiments, such bioreactors may include Wave™ disposable bioreactors.

[0828] In some embodiments, AAV particle production in animal cell bioreactor cultures may be carried out according to the methods taught in U.S. Pat. Nos. 5,064,764, 6,194,191, 6,566,118, 8,137,948 or US Patent Application No. US2011/0229971, the contents of each of which are herein incorporated by reference in their entirety.

### Cell Lysis

[0829] Cells of the invention, including, but not limited to viral production cells, may be subjected to cell lysis according to any methods known in the art. Cell lysis may be carried out to obtain one or more agents (e.g. viral particles) present within any cells of the invention. In some embodiments, cell lysis may be carried out according to any of the methods listed in U.S. Pat. Nos. 7,326,555, 7,579,181, 7,048,920, 6,410,300, 6,436,394, 7,732,129, 7,510,875, 7,445,930, 6,726,907, 6,194,191, 7,125,706, 6,995,006, 6,676,935, 7,968,333, 5,756,283, 6,258,595, 6,261,551, 6,270,996, 6,281,010, 6,365,394, 6,475,769, 6,482,634, 6,485,966, 6,943,019, 6,953,690, 7,022,519, 7,238,526, 7,291,498 and 7,491,508 or International Publication Nos. WO1996039530, WO1998010088, WO1999014354, WO1999015685, WO1999047691, WO2000055342, WO2000075353 and WO2001023597, the contents of each of which are herein incorporated by reference in their entirety. Cell lysis methods may be chemical or mechanical. Chemical cell lysis typically comprises contacting one or more cells with one or more lysis agent. Mechanical lysis typically comprises subjecting one or more cells to one or more lysis condition and/or one or more lysis force.

[0830] In some embodiments, chemical lysis may be used to lyse cells. As used herein, the term “lysis agent” refers to any agent that may aid in the disruption of a cell. In some cases, lysis agents are introduced in solutions, termed lysis solutions or lysis buffers. As used herein, the term “lysis solution” refers to a solution (typically aqueous) comprising one or more lysis agent. In addition to lysis agents, lysis solutions may include one or more buffering agents, solubilizing agents, surfactants, preservatives, cryoprotectants, enzymes, enzyme inhibitors and/or chelators. Lysis buffers are lysis solutions comprising one or more buffering agent. Additional components of lysis solutions may include one or more solubilizing agent. As used herein, the term “solubilizing agent” refers to a compound that enhances the solubility of one or more components of a solution and/or the solubility of one or more entities to which solutions are applied. In some cases, solubilizing agents enhance protein solubility. In some cases, solubilizing agents are selected based on their ability to enhance protein solubility while maintaining protein conformation and/or activity.

[0831] Exemplary lysis agents may include any of those described in U.S. Pat. Nos. 8,685,734, 7,901,921, 7,732,129, 7,223,585, 7,125,706, 8,236,495, 8,110,351, 7,419,956, 7,300,797, 6,699,706 and 6,143,567, the contents of each of which are herein incorporated by reference in their entirety. In some cases, lysis agents may be selected from lysis salts, amphoteric agents, cationic agents, ionic detergents and non-ionic detergents. Lysis salts may include, but are not limited to sodium chloride (NaCl) and potassium chloride (KCl.) Further lysis salts may include any of those described in U.S. Pat. Nos. 8,614,101, 7,326,555, 7,579,181, 7,048,920, 6,410,300, 6,436,394, 7,732,129, 7,510,875, 7,445,930, 6,726,907, 6,194,191, 7,125,706, 6,995,006, 6,676,935 and 7,968,333, the contents of each of which are herein incorporated by reference in their entirety. Concentrations of salts may be increased or decreased to obtain an effective concentration for rupture of cell membranes. Amphoteric agents, as referred to herein, are compounds capable of reacting as an acid or a base. Amphoteric agents may include, but are not limited to lysophosphatidylcholine, 3-((3-Cholamidopropyl) dimethylammonium)-1-propanesulfonate (CHAPS), Zwittergent® and the like. Cationic agents may include, but are not limited to cetyltrimethylammonium bromide (C (16) TAB) and Benzalkonium chloride. Lysis agents comprising detergents may include ionic detergents or non-ionic detergents. Detergents may function to break apart or dissolve cell structures including, but not limited to cell membranes, cell walls, lipids, carbohydrates, lipoproteins and glycoproteins. Exemplary ionic detergents include any of those taught in U.S. Pat. Nos. 7,625,570 and 6,593,123 or US Publication No. US2014/0087361, the contents of each of which are herein incorporated by reference in their entirety. Some ionic detergents may include, but are not limited to sodium dodecyl sulfate (SDS), cholate and deoxycholate. In some cases, ionic detergents may be included in lysis solutions as a solubilizing agent. Non-ionic detergents may include, but are not limited to octylglucoside, digitonin, lubrol, C12E8, TWEEN®-20, TWEEN®-80, Triton X-100 and Noniodet P-40. Non-ionic detergents are typically weaker lysis agents, but may be included as solubilizing agents for solubilizing cellular and/or viral proteins. Further lysis agents may include enzymes and urea. In some cases, one or more lysis agents may be combined in a lysis solution in order to enhance one or more of cell lysis and protein solubility. In some cases, enzyme inhibitors may be included in lysis solutions in order to prevent proteolysis that may be triggered by cell membrane disruption.

[0832] In some embodiments, mechanical cell lysis is carried out. Mechanical cell lysis methods may include the use of one or more lysis condition and/or one or more lysis force. As used herein, the term “lysis condition” refers to a state or circumstance that promotes cellular disruption. Lysis conditions may comprise certain temperatures, pressures, osmotic purity, salinity and the like. In some cases, lysis conditions comprise increased or decreased temperatures. According to some embodiments, lysis conditions comprise changes in temperature to promote cellular disruption. Cell lysis carried out according to such embodiments may include freeze-thaw lysis. As used herein, the term “freeze-thaw lysis” refers to cellular lysis in which a cell solution is subjected to one or more freeze-thaw cycle. According to freeze-thaw lysis methods, cells in solution are frozen to induce a mechanical disruption of cellular membranes caused by the formation and expansion of ice crystals. Cell solutions used according freeze-thaw lysis methods, may further comprise one or more lysis agents, solubilizing agents, buffering agents, cryoprotectants, surfactants, preservatives, enzymes, enzyme inhibitors and/or chelators. Once cell solutions subjected to freezing are thawed, such components may enhance the recovery of desired cellular products. In some cases, one or more cyroprotectants are included in cell solutions undergoing freeze-thaw lysis. As used herein, the term “cryoprotectant” refers to an agent used to protect one or more substance from damage due to freezing. Cryoprotectants may include any of those taught in US Publication No. US2013/0323302 or U.S. Pat. Nos. 6,503,888, 6,180,613, 7,888,096, 7,091,030, the contents of each of which are herein incorporated by reference in their entirety. In some cases, cryoprotectants may include, but are not limited to dimethyl sulfoxide, 1,2-propanediol, 2,3-butanediol, formamide, glycerol, ethylene glycol, 1,3-propanediol and n-dimethyl formamide, polyvinylpyrrolidone, hydroxyethyl starch, agarose, dextrans, inositol, glucose, hydroxyethylstarch, lactose, sorbitol, methyl glucose, sucrose and urea. In some embodiments, freeze-thaw lysis may be carried out according to any of the methods described in U.S. Pat. No. 7,704,721, the contents of which are herein incorporated by reference in their entirety.

[0833] As used herein, the term “lysis force” refers to a physical activity used to disrupt a cell. Lysis forces may include, but are not limited to mechanical forces, sonic forces, gravitational forces, optical forces, electrical forces and the like. Cell lysis carried out by mechanical force is referred to herein as “mechanical lysis.” Mechanical forces that may be used according to mechanical lysis may include high shear fluid forces. According to such methods of mechanical lysis, a microfluidizer may be used. Microfluidizers typically comprise an inlet reservoir where cell solutions may be applied. Cell solutions may then be pumped into an interaction chamber via a pump (e.g. high-pressure pump) at high speed and/or pressure to produce shear fluid forces. Resulting lysates may then be collected in one or more output reservoir. Pump speed and/or pressure may be adjusted to modulate cell lysis and enhance recovery of products (e.g. viral particles.) Other mechanical lysis methods may include physical disruption of cells by scraping.

[0834] Cell lysis methods may be selected based on the cell culture format of cells to be lysed. For example, with adherent cell cultures, some chemical and mechanical lysis methods may be used. Such mechanical lysis methods may include freeze-thaw lysis or scraping. In another example, chemical lysis of adherent cell cultures may be carried out through incubation with lysis solutions comprising surfactant, such as Triton-X-100. In some cases, cell lysates generated from adherent cell cultures may be treated with one more nuclease to lower the viscosity of the lysates caused by liberated DNA.

[0835] In one embodiment, a method for harvesting AAV particles without lysis may be used for efficient and scalable AAV particle production. In a non-limiting example, AAV particles may be produced by culturing an AAV particle lacking a heparin binding site, thereby allowing the AAV particle to pass into the supernatant, in a cell culture, collecting supernatant from the culture; and isolating the AAV particle from the supernatant, as described in US Patent Application 20090275107, the contents of which are incorporated herein by reference in their entirety.

### Clarification

[0836] Cell lysates comprising viral particles may be subjected to clarification. Clarification refers to initial steps taken in purification of viral particles from cell lysates. Clarification serves to prepare lysates for further purification by removing larger, insoluble debris. Clarification steps may include, but are not limited to centrifugation and filtration. During clarification, centrifugation may be carried out at low speeds to remove larger debris, only. Similarly, filtration may be carried out using filters with larger pore sizes so that only larger debris is removed. In some cases, tangential flow filtration may be used during clarification. Objectives of viral clarification include high throughput processing of cell lysates and to optimize ultimate viral recovery. Advantages of including a clarification step include scalability for processing of larger volumes of lysate. In some embodiments, clarification may be carried out according to any of the methods presented in U.S. Pat. Nos. 8,524,446, 5,756,283, 6,258,595, 6,261,551, 6,270,996, 6,281,010, 6,365,394, 6,475,769, 6,482,634, 6,485,966, 6,943,019, 6,953,690, 7,022,519, 7,238,526, 7,291,498, 7,491,508, US Publication Nos. US2013/0045186, US2011/0263027, US2011/0151434, US2003/0138772, and International Publication Nos. WO2002012455, WO1996039530, WO1998010088, WO1999014354, WO1999015685, WO1999047691, WO2000055342, WO2000075353 and WO2001023597, the contents of each of which are herein incorporated by reference in their entirety.

[0837] Methods of cell lysate clarification by filtration are well understood in the art and may be carried out according to a variety of available methods including, but not limited to passive filtration and flow filtration. Filters used may comprise a variety of materials and pore sizes. For example, cell lysate filters may comprise pore sizes of from about 1 μM to about 5 μM, from about 0.5 μM to about 2 μM, from about 0.1 μM to about 1 μM, from about 0.05 μM to about 0.05 μM and from about 0.001 μM to about 0.1 μM. Exemplary pore sizes for cell lysate filters may include, but are not limited to, 2.0, 1.9, 1.8, 1.7, 1.6, 1.5, 1.4, 1.3, 1.2, 1.1, 1, 0.9, 0.8, 0.7, 0.6, 0.5, 0.4, 0.3, 0.2, 0.1, 0.95, 0.9, 0.85, 0.8, 0.75, 0.7, 0.65, 0.6, 0.55, 0.5, 0.45, 0.4, 0.35, 0.3, 0.25, 0.2, 0.15, 0.1, 0.05, 0.22, 0.21, 0.20, 0.19, 0.18, 0.17, 0.16, 0.15, 0.14, 0.13, 0.12, 0.11, 0.1, 0.09, 0.08, 0.07, 0.06, 0.05, 0.04, 0.03, 0.02, 0.01, 0.02, 0.019, 0.018, 0.017, 0.016, 0.015, 0.014, 0.013, 0.012, 0.011, 0.01, 0.009, 0.008, 0.007, 0.006, 0.005, 0.004, 0.003, 0.002, 0.001 and 0.001 μM. In one embodiment, clarification may comprise filtration through a filter with 2.0 μM pore size to remove large debris, followed by passage through a filter with 0.45 μM pore size to remove intact cells.

[0838] Filter materials may be composed of a variety of materials. Such materials may include, but are not limited to polymeric materials and metal materials (e.g. sintered metal and pored aluminum.) Exemplary materials may include, but are not limited to nylon, cellulose materials (e.g. cellulose acetate), polyvinylidene fluoride (PVDF), polyethersulfone, polyamide, polysulfone, polypropylene, and polyethylene terephthalate. In some cases, filters useful for clarification of cell lysates may include, but are not limited to ULTIPLEAT PROFILE™ filters (Pall Corporation, Port Washington, NY), SUPOR™ membrane filters (Pall Corporation, Port Washington, NY)

[0839] In some cases, flow filtration may be carried out to increase filtration speed and/or effectiveness. In some cases, flow filtration may comprise vacuum filtration. According to such methods, a vacuum is created on the side of the filter opposite that of cell lysate to be filtered. In some cases, cell lysates may be passed through filters by centrifugal forces. In some cases, a pump is used to force cell lysate through clarification filters. Flow rate of cell lysate through one or more filters may be modulated by adjusting one of channel size and/or fluid pressure.

[0840] According to some embodiments, cell lysates may be clarified by centrifugation. Centrifugation may be used to pellet insoluble particles in the lysate. During clarification, centrifugation strength [expressed in terms of gravitational units (g), which represents multiples of standard gravitational force] may be lower than in subsequent purification steps. In some cases, centrifugation may be carried out on cell lysates at from about 200 g to about 800 g, from about 500 g to about 1500 g, from about 1000 g to about 5000 g, from about 1200 g to about 10000 g or from about 8000 g to about 15000 g. In some embodiments, cell lysate centrifugation is carried out at 8000 g for 15 minutes. In some cases, density gradient centrifugation may be carried out in order to partition particulates in the cell lysate by sedimentation rate. Gradients used according to methods of the present disclosure may include, but are not limited to cesium chloride gradients and iodixanol step gradients.

### Purification: Chromatography

[0841] In some cases, AAV particles may be purified from clarified cell lysates by one or more methods of chromatography. Chromatography refers to any number of methods known in the art for separating out one or more elements from a mixture. Such methods may include, but are not limited to ion exchange chromatography (e.g. cation exchange chromatography and anion exchange chromatography), immunoaffinity chromatography and size-exclusion chromatography. In some embodiments, methods of viral chromatography may include any of those taught in U.S. Pat. Nos. 5,756,283, 6,258,595, 6,261,551, 6,270,996, 6,281,010, 6,365,394, 6,475,769, 6,482,634, 6,485,966, 6,943,019, 6,953,690, 7,022,519, 7,238,526, 7,291,498 and 7,491,508 or International Publication Nos. WO1996039530, WO1998010088, WO1999014354, WO1999015685, WO1999047691, WO2000055342, WO2000075353 and WO2001023597, the contents of each of which are herein incorporated by reference in their entirety.

[0842] In some embodiments, ion exchange chromatography may be used to isolate viral particles. Ion exchange chromatography is used to bind viral particles based on charge-charge interactions between capsid proteins and charged sites present on a stationary phase, typically a column through which viral preparations (e.g. clarified lysates) are passed. After application of viral preparations, bound viral particles may then be eluted by applying an elution solution to disrupt the charge-charge interactions. Elution solutions may be optimized by adjusting salt concentration and/or pH to enhance recovery of bound viral particles. Depending on the charge of viral capsids being isolated, cation or anion exchange chromatography methods may be selected. Methods of ion exchange chromatography may include, but are not limited to any of those taught in U.S. Pat. Nos. 7,419,817, 6,143,548, 7,094,604, 6,593,123, 7,015,026 and 8,137,948, the contents of each of which are herein incorporated by reference in their entirety.

[0843] In some embodiments, immunoaffinity chromatography may be used. Immunoaffinity chromatography is a form of chromatography that utilizes one or more immune compounds (e.g. antibodies or antibody-related structures) to retain viral particles. Immune compounds may bind specifically to one or more structures on viral particle surfaces, including, but not limited to one or more viral coat protein. In some cases, immune compounds may be specific for a particular viral variant. In some cases, immune compounds may bind to multiple viral variants. In some embodiments, immune compounds may include recombinant single-chain antibodies. Such recombinant single chain antibodies may include those described in Smith, R. H. et al., 2009. Mol. Ther. 17(11):1888-96, the contents of which are herein incorporated by reference in their entirety. Such immune compounds are capable of binding to several AAV capsid variants, including, but not limited to AAV1, AAV2, AAV6 and AAV8.

[0844] In some embodiments, size-exclusion chromatography (SEC) may be used. SEC may comprise the use of a gel to separate particles according to size. In viral particle purification, SEC filtration is sometimes referred to as “polishing.” In some cases, SEC may be carried out to generate a final product that is near-homogenous. Such final products may in some cases be used in pre-clinical studies and/or clinical studies (Kotin, R. M. 2011. Human Molecular Genetics. 20(1):R2-R6, the contents of which are herein incorporated by reference in their entirety.) In some cases, SEC may be carried out according to any of the methods taught in U.S. Pat. Nos. 6,143,548, 7,015,026, 8,476,418, 6,410,300, 8,476,418, 7,419,817, 7,094,604, 6,593,123, and 8,137,948, the contents of each of which are herein incorporated by reference in their entirety.

[0845] In one embodiment, the compositions comprising at least one AAV particle may be isolated or purified using the methods described in U.S. Pat. No. 6,146,874, the contents of which are herein incorporated by reference in its entirety.

[0846] In one embodiment, the compositions comprising at least one AAV particle may be isolated or purified using the methods described in U.S. Pat. No. 6,660,514, the contents of which are herein incorporated by reference in its entirety.

[0847] In one embodiment, the compositions comprising at least one AAV particle may be isolated or purified using the methods described in U.S. Pat. No. 8,283,151, the contents of which are herein incorporated by reference in its entirety.

[0848] In one embodiment, the compositions comprising at least one AAV particle may be isolated or purified using the methods described in U.S. Pat. No. 8,524,446, the contents of which are herein incorporated by reference in its entirety.

### II. Formulation and Delivery

### Pharmaceutical Compositions and Formulation

[0849] Although the descriptions of pharmaceutical compositions, e.g., those modulatory polynucleotides (including the encoding plasmids or expression vectors, such as viruses, e.g., AAV) comprising a payload to be delivered, provided herein are principally directed to pharmaceutical compositions which are suitable for administration to humans, it will be understood by the skilled artisan that such compositions are generally suitable for administration to any other animal, e.g., to non-human animals, e.g. non-human mammals. Modification of pharmaceutical compositions suitable for administration to humans in order to render the compositions suitable for administration to various animals is well understood, and the ordinarily skilled veterinary pharmacologist can design and/or perform such modification with merely ordinary, if any, experimentation. Subjects to which administration of the pharmaceutical compositions is contemplated include, but are not limited to, humans and/or other primates; mammals, including commercially relevant mammals such as cattle, pigs, horses, sheep, cats, dogs, mice, and/or rats; and/or birds, including commercially relevant birds such as poultry, chickens, ducks, geese, and/or turkeys.

[0850] In some embodiments, compositions are administered to humans, human patients or subjects. For the purposes of the present disclosure, the phrase “active ingredient” generally refers either to the viral vector carrying the payload or to the modulatory polynucleotide payload molecule delivered by a viral vector as described herein.

[0851] Formulations of the pharmaceutical compositions described herein may be prepared by any method known or hereafter developed in the art of pharmacology. In general, such preparatory methods include the step of bringing the active ingredient into association with an excipient and/or one or more other accessory ingredients, and then, if necessary and/or desirable, dividing, shaping and/or packaging the product into a desired single- or multi-dose unit.

[0852] Relative amounts of the active ingredient, the pharmaceutically acceptable excipient, and/or any additional ingredients in a pharmaceutical composition in accordance with the invention will vary, depending upon the identity, size, and/or condition of the subject treated and further depending upon the route by which the composition is to be administered.

[0853] The modulatory polynucleotides or viral vectors encoding them can be formulated using one or more excipients to: (1) increase stability; (2) increase cell transfection or transduction; (3) permit the sustained or delayed release; or (4) alter the biodistribution (e.g., target the viral vector to specific tissues or cell types).

[0854] Formulations of the present invention can include, without limitation, saline, lipidoids, liposomes, lipid nanoparticles, polymers, lipoplexes, core-shell nanoparticles, peptides, proteins, cells transfected with viral vectors (e.g., for transplantation into a subject), nanoparticle mimics and combinations thereof. Further, the viral vectors of the present invention may be formulated using self-assembled nucleic acid nanoparticles.

[0855] Formulations of the pharmaceutical compositions described herein may be prepared by any method known or hereafter developed in the art of pharmacology. In general, such preparatory methods include the step of associating the active ingredient with an excipient and/or one or more other accessory ingredients.

[0856] A pharmaceutical composition in accordance with the present disclosure may be prepared, packaged, and/or sold in bulk, as a single unit dose, and/or as a plurality of single unit doses. As used herein, a “unit dose” refers to a discrete amount of the pharmaceutical composition comprising a predetermined amount of the active ingredient. The amount of the active ingredient is generally equal to the dosage of the active ingredient which would be administered to a subject and/or a convenient fraction of such a dosage such as, for example, one-half or one-third of such a dosage.

[0857] Relative amounts of the active ingredient, the pharmaceutically acceptable excipient, and/or any additional ingredients in a pharmaceutical composition in accordance with the present disclosure may vary, depending upon the identity, size, and/or condition of the subject being treated and further depending upon the route by which the composition is to be administered. For example, the composition may comprise between 0.1% and 99% (w/w) of the active ingredient. By way of example, the composition may comprise between 0.1% and 100%, e.g., between 0.5 and 50%, between 1-30%, between 5-80%, at least 80% (w/w) active ingredient.

[0858] In some embodiments, the formulations described herein may contain at least one payload molecule. As a non-limiting example, the formulations may contain 1, 2, 3, 4 or 5 modulatory polynucleotide payload molecules. In one embodiment the formulation may contain a modulatory polynucleotide payload construct targeting proteins selected from categories such as, but not limited to, human proteins, veterinary proteins, bacterial proteins, biological proteins, antibodies, immunogenic proteins, therapeutic peptides and proteins, secreted proteins, plasma membrane proteins, cytoplasmic and cytoskeletal proteins, intracellular membrane bound proteins, nuclear proteins, proteins associated with human disease and/or proteins associated with non-human diseases. In one embodiment, the formulation contains at least three payload construct targeting proteins.

[0859] In some embodiments, a pharmaceutically acceptable excipient may be at least 95%, at least 96%, at least 97%, at least 98%, at least 99%, or 100% pure. In some embodiments, an excipient is approved for use for humans and for veterinary use. In some embodiments, an excipient may be approved by the United States Food and Drug Administration. In some embodiments, an excipient may be of pharmaceutical grade. In some embodiments, an excipient may meet the standards of the United States Pharmacopoeia (USP), the European Pharmacopoeia (EP), the British Pharmacopoeia, and/or the International Pharmacopoeia.

[0860] Excipients, which, as used herein, includes, but is not limited to, any and all solvents, dispersion media, diluents, or other liquid vehicles, dispersion or suspension aids, surface active agents, isotonic agents, thickening or emulsifying agents, preservatives, and the like, as suited to the particular dosage form desired. Various excipients for formulating pharmaceutical compositions and techniques for preparing the composition are known in the art (see Remington: The Science and Practice of Pharmacy, 21^{st} Edition, A. R. Gennaro, Lippincott, Williams & Wilkins, Baltimore, MD, 2006; incorporated herein by reference in its entirety). The use of a conventional excipient medium may be contemplated within the scope of the present disclosure, except insofar as any conventional excipient medium may be incompatible with a substance or its derivatives, such as by producing any undesirable biological effect or otherwise interacting in a deleterious manner with any other component(s) of the pharmaceutical composition.

[0861] Exemplary diluents include, but are not limited to, calcium carbonate, sodium carbonate, calcium phosphate, dicalcium phosphate, calcium sulfate, calcium hydrogen phosphate, sodium phosphate lactose, sucrose, cellulose, microcrystalline cellulose, kaolin, mannitol, sorbitol, inositol, sodium chloride, dry starch, cornstarch, powdered sugar, etc., and/or combinations thereof.

### Inactive Ingredients

[0862] In some embodiments, modulatory polynucleotide formulations may comprise at least one excipient which is an inactive ingredient. As used herein, the term “inactive ingredient” refers to one or more inactive agents included in formulations. In some embodiments, all, none or some of the inactive ingredients which may be used in the formulations of the present invention may be approved by the US Food and Drug Administration (FDA).

[0863] Formulations of viral vectors carrying modulatory polynucleotide disclosed herein may include cations or anions. In one embodiment, the formulations include metal cations such as, but not limited to, Zn2+, Ca2+, Cu2+, Mg+ and combinations thereof. As a non-limiting example, formulations may include polymers and modulatory polynucleotides complexed with a metal cation (See e.g., U.S. Pat. Nos. 6,265,389 and 6,555,525, each of which is herein incorporated by reference in its entirety).

### Delivery

[0864] In one embodiment, the viral vector comprising a modulatory polynucleotide may be administered or delivered using the methods for the delivery of AAV virions described in European Patent Application No. EP1857552, the contents of which are herein incorporated by reference in their entirety.

[0865] In one embodiment, the viral vector comprising a modulatory polynucleotide may be administered or delivered using the methods for delivering proteins using AAV vectors described in European Patent Application No. EP2678433, the contents of which are herein incorporated by reference in their entirety.

[0866] In one embodiment, the viral vector comprising a modulatory polynucleotide may be administered or delivered using the methods for delivering DNA molecules using AAV vectors described in U.S. Pat. No. 5,858,351, the contents of which are herein incorporated by reference in their entirety.

[0867] In one embodiment, the viral vector comprising a modulatory polynucleotide may be administered or delivered using the methods for delivering DNA to the bloodstream described in U.S. Pat. No. 6,211,163, the contents of which are herein incorporated by reference in their entirety.

[0868] In one embodiment, the viral vector comprising a modulatory polynucleotide may be administered or delivered using the methods for delivering AAV virions described in U.S. Pat. No. 6,325,998, the contents of which are herein incorporated by reference in their entirety.

[0869] In one embodiment, the viral vector comprising a modulatory polynucleotide may be administered or delivered using the methods for delivering DNA to muscle cells described in U.S. Pat. No. 6,335,011, the contents of which are herein incorporated by reference in their entirety.

[0870] In one embodiment, the viral vector comprising a modulatory polynucleotide may be administered or delivered using the methods for delivering DNA to muscle cells and tissues described in U.S. Pat. No. 6,610,290, the contents of which are herein incorporated by reference in their entirety.

[0871] In one embodiment, the viral vector comprising a modulatory polynucleotide may be administered or delivered using the methods for delivering DNA to muscle cells described in U.S. Pat. No. 7,704,492, the contents of which are herein incorporated by reference in their entirety.

[0872] In one embodiment, the viral vector comprising a modulatory polynucleotide may be administered or delivered using the methods for delivering a payload to skeletal muscles described in U.S. Pat. No. 7,112,321, the contents of which are herein incorporated by reference in their entirety.

[0873] In one embodiment, the viral vector may be administered or delivered using the methods for delivering a payload to the central nervous system described in U.S. Pat. No. 7,588,757, the contents of which are herein incorporated by reference in their entirety.

[0874] In one embodiment, the viral vector comprising a modulatory polynucleotide may be administered or delivered using the methods for delivering a payload described in U.S. Pat. No. 8,283,151, the contents of which are herein incorporated by reference in their entirety.

[0875] In one embodiment, the viral vector comprising a modulatory polynucleotide may be administered or delivered using the methods for delivering a payload for the treatment of Alzheimer disease described in U.S. Pat. No. 8,318,687, the contents of which are herein incorporated by reference in their entirety.

[0876] In one embodiment, the viral vector comprising a modulatory polynucleotide may be administered or delivered using the methods for delivering a payload described in International Patent Publication No. WO2012144446, the contents of which are herein incorporated by reference in their entirety.

[0877] In one embodiment, the viral vector comprising a modulatory polynucleotide may be administered or delivered using the methods for delivering a payload using a glutamic acid decarboxylase (GAD) delivery vector described in International Patent Publication No. WO2001089583, the contents of which are herein incorporated by reference in their entirety.

[0878] In one embodiment, the viral vector comprising a modulatory polynucleotide may be administered or delivered using the methods for delivering a payload described in International Patent Publication No. WO2001096587, the contents of which are herein incorporated by reference in their entirety.

[0879] In one embodiment, the viral vector comprising a modulatory polynucleotide may be administered or delivered using the methods for delivering a payload to muscle tissue described in International Patent Publication No. WO2002014487, the contents of which are herein incorporated by reference in their entirety.

[0880] In one embodiment, the viral vector comprising a modulatory polynucleotide may be administered or delivered using the methods for delivering a payload to neural cells described in International Patent Publication No. WO2012057363, the contents of which are herein incorporated by reference in their entirety.

[0881] The pharmaceutical compositions of viral vectors described herein may be characterized by one or more of bioavailability, therapeutic window and/or volume of distribution.

[0882] In one embodiment, the viral vectors comprising a modulatory polynucleotide may be formulated. As a non-limiting example the baricity and/or osmolality of the formulation may be optimized to ensure optimal drug distribution in the central nervous system or a region or component of the central nervous system.

[0883] In one embodiment, the viral vectors comprising a modulatory polynucleotide may be delivered to a subject via a single route administration.

[0884] In one embodiment, the viral vectors comprising a modulatory polynucleotide may be delivered to a subject via a multi-site route of administration. A subject may be administered the viral vectors comprising a modulatory polynucleotide at 2, 3, 4, 5 or more than 5 sites.

[0885] In one embodiment, a subject may be administered the viral vectors comprising a modulatory polynucleotide described herein using a bolus infusion.

[0886] In one embodiment, a subject may be administered the viral vectors comprising a modulatory polynucleotide described herein using sustained delivery over a period of minutes, hours or days. The infusion rate may be changed depending on the subject, distribution, formulation or another delivery parameter.

[0887] In one embodiment, the catheter may be located at more than one site in the spine for multi-site delivery. The viral vectors comprising a modulatory polynucleotide may be delivered in a continuous and/or bolus infusion. Each site of delivery may be a different dosing regimen or the same dosing regimen may be used for each site of delivery. As a non-limiting example, the sites of delivery may be in the cervical and the lumbar region. As another non-limiting example, the sites of delivery may be in the cervical region. As another non-limiting example, the sites of delivery may be in the lumbar region.

[0888] In one embodiment, a subject may be analyzed for spinal anatomy and pathology prior to delivery of the viral vectors comprising a modulatory polynucleotide described herein. As a non-limiting example, a subject with scoliosis may have a different dosing regimen and/or catheter location compared to a subject without scoliosis.

[0889] In one embodiment, the orientation of the spine subject during delivery of the viral vectors comprising a modulatory polynucleotide may be vertical to the ground.

[0890] In another embodiment, the orientation of the spine of the subject during delivery of the viral vectors comprising a modulatory polynucleotide may be horizontal to the ground.

[0891] In one embodiment, the spine of the subject may be at an angle as compared to the ground during the delivery of the viral vectors comprising a modulatory polynucleotide subject. The angle of the spine of the subject as compared to the ground may be at least 10, 20, 30, 40, 50, 60, 70, 80, 90, 100, 110, 120, 130, 140, 150 or 180 degrees.

[0892] In one embodiment, the delivery method and duration is chosen to provide broad transduction in the spinal cord. As a non-limiting example, intrathecal delivery is used to provide broad transduction along the rostral-caudal length of the spinal cord. As another non-limiting example, multi-site infusions provide a more uniform transduction along the rostral-caudal length of the spinal cord. As yet another non-limiting example, prolonged infusions provide a more uniform transduction along the rostral-caudal length of the spinal cord.

Introduction into Cells

[0893] The modulatory polynucleotides of the invention can be introduced into host cells using any of a variety of approaches. Infection with a viral vector comprising the modulatory polynucleotide can be affected. Examples of suitable viral vectors include replication defective retroviral vectors, adenoviral vectors, adeno-associated vectors and lentiviral vectors.

[0894] According to the present invention, viral vectors for use in therapeutics and/or diagnostics comprise a virus that has been distilled or reduced to the minimum components necessary for transduction of a nucleic acid payload or cargo of interest.

[0895] In this manner, viral vectors are engineered as vehicles for specific delivery while lacking the deleterious replication and/or integration features found in wild-type virus.

[0896] As used herein, a “vector” is any molecule or moiety which transports, transduces or otherwise acts as a carrier of a heterologous molecule such as the modulatory polynucleotides of the invention. A “viral vector” is a vector which comprises one or more polynucleotide regions encoding or comprising payload molecules of interest, e.g., a transgene, a polynucleotide encoding a polypeptide or multi-polypeptide or a modulatory nucleic acid. Viral vectors of the present invention may be produced recombinantly and may be based on adeno-associated virus (AAV) parent or reference sequences. Serotypes which may be useful in the present invention include any of those arising from AAV1, AAV2, AAV3, AAV4, AAV5, AAV6, AAV7, AAV8, AAV9, AAV9.47, AAV9(hul4), AAV10, AAV11, AAV12, AAVrh8, AAVrh10, AAV-DJ, AAV-DJ8, AAV-PHP.A and/or AAV-PHP.B.

[0897] In one embodiment, the serotype which may be useful in the present invention may be AAV-DJ8. The amino acid sequence of AAV-DJ8 may comprise two or more mutations in order to remove the heparin binding domain (HBD). As a non-limiting example, the AAV-DJ sequence described as SEQ ID NO: 1 in U.S. Pat. No. 7,588,772, the contents of which are herein incorporated by reference in their entirety, may comprise two mutations: (1) R587Q where arginine (R; Arg) at amino acid 587 is changed to glutamine (Q; Gln) and (2) R590T where arginine (R; Arg) at amino acid 590 is changed to threonine (T; Thr). As another non-limiting example, may comprise three mutations: (1) K406R where lysine (K; Lys) at amino acid 406 is changed to arginine (R; Arg), (2) R587Q where arginine (R; Arg) at amino acid 587 is changed to glutamine (Q; Gln) and (3) R590T where arginine (R; Arg) at amino acid 590 is changed to threonine (T; Thr).

[0898] AAV vectors may also comprise self-complementary AAV vectors (scAAVs). scAAV vectors contain both DNA strands which anneal together to form double stranded DNA. By skipping second strand synthesis, scAAVs allow for rapid expression in the cell.

[0899] In one embodiment, the AAV vector used in the present invention is a scAAV.

[0900] In one embodiment, the modulatory polynucleotides may be introduced into cells from any relevant species, such as, but not limited to, human, dog, mouse, rat or monkey.

[0901] In one embodiment, the modulatory polynucleotides may be introduced into cells which are relevant to the disease to be treated. As a non-limiting example, the disease is ALS and the target cells are motor neurons and astrocytes.

[0902] In one embodiment, the modulatory polynucleotides may be introduced into cells which have a high level of endogenous expression of the target sequence.

[0903] In another embodiment, the modulatory polynucleotides may be introduced into cells which have a low level of endogenous expression of the target sequence.

[0904] In one embodiment, the cells may be those which have a high efficiency of AAV transduction.

[0905] In one embodiment, the cells which may be used for in vitro analysis of the modulatory polynucleotides include, but are not limited to, HEK293, HeLa, human primary astrocytes, human astrocyte cell line (U251MG), SH-SY5Y-neurons and human iPSC-derived motor neuron progenitors.

### III. Administration and Dosing

### Administration

[0906] The viral vectors comprising modulatory polynucleotides of the present invention may be administered by any route which results in a therapeutically effective outcome. These include, but are not limited to enteral (into the intestine), gastroenteral, epidural (into the dura matter), oral (by way of the mouth), transdermal, peridural, intracerebral (into the cerebrum), intracerebroventricular (into the cerebral ventricles), epicutaneous (application onto the skin), intradermal, (into the skin itself), subcutaneous (under the skin), nasal administration (through the nose), intravenous (into a vein), intravenous bolus, intravenous drip, intraarterial (into an artery), intramuscular (into a muscle), intracardiac (into the heart), intraosseous infusion (into the bone marrow), intrathecal (into the spinal canal), subpial (between the pia and the underlying tissue), intraperitoneal, (infusion or injection into the peritoneum), intravesical infusion, intravitreal, (through the eye), intracavernous injection (into a pathologic cavity) intracavitary (into the base of the penis), intravaginal administration, intrauterine, extra-amniotic administration, transdermal (diffusion through the intact skin for systemic distribution), transmucosal (diffusion through a mucous membrane), transvaginal, insufflation (snorting), sublingual, sublabial, enema, eye drops (onto the conjunctiva), in ear drops, auricular (in or by way of the ear), buccal (directed toward the cheek), conjunctival, cutaneous, dental (to a tooth or teeth), electro-osmosis, endocervical, endosinusial, endotracheal, extracorporeal, hemodialysis, infiltration, interstitial, intra-abdominal, intra-amniotic, intra-articular, intrabiliary, intrabronchial, intrabursal, intracartilaginous (within a cartilage), intracaudal (within the cauda equine), intracisternal (within the cisterna magna cerebellomedularis), intracorneal (within the cornea), dental intracornal, intracoronary (within the coronary arteries), intracorporus cavernosum (within the dilatable spaces of the corporus cavernosa of the penis), intradiscal (within a disc), intraductal (within a duct of a gland), intraduodenal (within the duodenum), intradural (within or beneath the dura), intraepidermal (to the epidermis), intraesophageal (to the esophagus), intragastric (within the stomach), intragingival (within the gingivae), intraileal (within the distal portion of the small intestine), intralesional (within or introduced directly to a localized lesion), intraluminal (within a lumen of a tube), intralymphatic (within the lymph), intramedullary (within the marrow cavity of a bone), intrameningeal (within the meninges), intraocular (within the eye), intraovarian (within the ovary), intrapericardial (within the pericardium), intrapleural (within the pleura), intraprostatic (within the prostate gland), intrapulmonary (within the lungs or its bronchi), intrasinal (within the nasal or periorbital sinuses), intraspinal (within the vertebral column), intrasynovial (within the synovial cavity of a joint), intratendinous (within a tendon), intratesticular (within the testicle), intrathecal (within the cerebrospinal fluid at any level of the cerebrospinal axis), intrathoracic (within the thorax), intratubular (within the tubules of an organ), intratumor (within a tumor), intratympanic (within the aurus media), intravascular (within a vessel or vessels), intraventricular (within a ventricle), iontophoresis (by means of electric current where ions of soluble salts migrate into the tissues of the body), irrigation (to bathe or flush open wounds or body cavities), laryngeal (directly upon the larynx), nasogastric (through the nose and into the stomach), occlusive dressing technique (topical route administration which is then covered by a dressing which occludes the area), ophthalmic (to the external eye), oropharyngeal (directly to the mouth and pharynx), parenteral, percutaneous, periarticular, peridural, perineural, periodontal, rectal, respiratory (within the respiratory tract by inhaling orally or nasally for local or systemic effect), retrobulbar (behind the pons or behind the eyeball), soft tissue, subarachnoid, subconjunctival, submucosal, topical, transplacental (through or across the placenta), transtracheal (through the wall of the trachea), transtympanic (across or through the tympanic cavity), ureteral (to the ureter), urethral (to the urethra), vaginal, caudal block, diagnostic, nerve block, biliary perfusion, cardiac perfusion, photopheresis or spinal. In specific embodiments, compositions may be administered in a way which allows them to cross the blood-brain barrier, vascular barrier, or other epithelial barrier. In one embodiment, a formulation for a route of administration may include at least one inactive ingredient.

### Dosing

[0907] The present invention provides methods comprising administering viral vectors and their modulatory polynucleotide payload or complexes in accordance with the invention to a subject in need thereof. Viral vector pharmaceutical, imaging, diagnostic, or prophylactic compositions thereof, may be administered to a subject using any amount and any route of administration effective for preventing, treating, diagnosing, or imaging a disease, disorder, and/or condition (e.g., a disease, disorder, and/or condition relating to working memory deficits). The exact amount required will vary from subject to subject, depending on the species, age, and general condition of the subject, the severity of the disease, the particular composition, its mode of administration, its mode of activity, and the like. Compositions in accordance with the invention are typically formulated in unit dosage form for ease of administration and uniformity of dosage. It will be understood, however, that the total daily usage of the compositions of the present invention may be decided by the attending physician within the scope of sound medical judgment. The specific therapeutically effective, prophylactically effective, or appropriate imaging dose level for any particular patient will depend upon a variety of factors including the disorder being treated and the severity of the disorder; the activity of the specific compound employed; the specific composition employed; the age, body weight, general health, sex and diet of the patient; the time of administration, route of administration, and rate of excretion of the specific modulatory polynucleotide payload employed; the duration of the treatment; drugs used in combination or coincidental with the specific compound employed; and like factors well known in the medical arts.

[0908] In certain embodiments, viral vector pharmaceutical compositions in accordance with the present invention may be administered at modulatory polynucleotide dosage levels sufficient to deliver from about 0.0001 mg/kg to about 100 mg/kg, from about 0.001 mg/kg to about 0.05 mg/kg, from about 0.005 mg/kg to about 0.05 mg/kg, from about 0.001 mg/kg to about 0.005 mg/kg, from about 0.05 mg/kg to about 0.5 mg/kg, from about 0.01 mg/kg to about 50 mg/kg, from about 0.1 mg/kg to about 40 mg/kg, from about 0.5 mg/kg to about 30 mg/kg, from about 0.01 mg/kg to about 10 mg/kg, from about 0.1 mg/kg to about 10 mg/kg, or from about 1 mg/kg to about 25 mg/kg, of subject body weight per day, one or more times a day, to obtain the desired therapeutic, diagnostic, prophylactic, or imaging effect (see e.g., the range of unit doses described in International Publication No WO2013078199, herein incorporated by reference in its entirety). The desired modulatory polynucleotide dosage may be delivered more than once (e.g., more than one administration in a day). In certain embodiments, the desired modulatory polynucleotide dosage may be delivered using multiple administrations (e.g., two, three, four, five, six, seven, eight, nine, ten, eleven, twelve, thirteen, fourteen, or more administrations). When multiple administrations are employed, split dosing regimens such as those described herein may be used. As used herein, a “split dose” is the division of single unit dose or total daily dose into two or more doses, e.g., two or more administrations of the single unit dose. As used herein, a “single unit dose” is a dose of any modulatory polynucleotide therapeutic administered in one dose/at one time/single route/single point of contact, i.e., single administration event. As used herein, a “total daily dose” is an amount given or prescribed in 24 hour period. It may be administered as a single unit dose. In one embodiment, the viral vectors comprising the modulatory polynucleotides of the present invention are administered to a subject in split doses. They may be formulated in buffer only or in a formulation described herein.

[0909] In one embodiment, delivery of the compositions in accordance with the present invention to cells comprises a rate of delivery defined by [VG/hour=mL/hour * VG/mL] wherein VG is viral genomes, VG/mL is composition concentration, and mL/hour is rate of prolonged delivery.

[0910] In one embodiment, delivery of compositions in accordance with the present invention to cells may comprise a total concentration per subject between about 1×10⁶ VG and about 1×10¹⁶ VG. In some embodiments, delivery may comprise a composition concentration of about 1×10⁶, 2×10⁶, 3×10⁶, 4×10⁶, 5×10⁶, 6×10⁶, 7×10⁶, 8×10⁶, 9×10⁶, 1×10⁷, 2×10⁷, 3×10⁷, 4×10⁷, 5×10⁷, 6×10⁷, 7×10⁷, 8×10⁷, 9×10⁷, 1×10⁸, 2×10⁸, 3×10⁸, 4×10⁸, 5×10⁸, 6×10⁸, 7×10⁸, 8×10⁸, 9×10⁸, 1×10⁹, 2×10⁹, 3×10⁹, 4×10⁹, 5×10⁹, 6×10⁹, 7×10⁹, 8×10⁹, 9×10⁹, 1×10¹⁰, 2×10¹⁰, 3×10¹⁰, 4×10¹⁰, 5×10¹⁰, 6×10¹⁰, 7×10¹⁰, 8×10¹⁰, 9×10¹⁰, 1×10¹¹, 1.1×10¹¹, 1.2×10¹¹, 1.3×10¹¹, 1.4×10¹¹, 1.5×10¹¹, 1.6×10¹¹, 1.7×10¹¹, 1.8×10¹¹, 1.9×10¹¹, 2×10¹¹, 2.1×10¹¹, 2.2×10¹¹, 2.3×10¹¹, 2.4×10¹¹, 2.5×10¹¹, 2.6×10¹¹, 2.7×10¹¹, 2.8×10¹¹, 2.9×10¹¹, 3×10¹¹, 4×10¹¹, 5×10¹¹, 6×10¹¹, 7×10¹¹, 7.1×10¹¹, 7.2×10¹¹, 7.3×10¹¹, 7.4×10¹¹, 7.5×10¹¹, 7.6×10¹¹, 7.7×10¹¹, 7.8×10¹¹, 7.9×10¹¹, 8×10¹¹, 9×10¹¹, 1×10¹², 1.1×10¹², 1.2×10¹², 1.3×10¹², 1.4×10¹², 1.5×10¹², 1.6×10¹², 1.7×10¹², 1.8×10¹², 1.9×10¹², 2×10¹², 2.1×10¹², 2.2×10¹², 2.3×10¹², 2.4×10¹², 2.5×10¹², 2.6×10¹², 2.7×10¹², 2.8×10¹², 2.9×10¹², 3×10¹², 3.1×10¹², 3.2×10¹², 3.3×10¹², 3.4×10¹², 3.5×10¹², 3.6×10¹², 3.7×10¹², 3.8×10¹², 3.9×10¹², 4×10¹², 4.1×10¹², 4.2×10¹², 4.3×10¹², 4.4×10¹², 4.5×10¹², 4.6×10¹², 4.7×10¹², 4.8×10¹², 4.9×10¹², 5×10¹², 6×10¹², 6.1×10¹², 6.2×10¹², 6.3×10¹², 6.4×10¹², 6.5×10¹², 6.6×10¹², 6.7×10¹², 6.8×10¹², 6.9×10¹², 7×10¹², 8×10¹², 8.1×10¹², 8.2×10¹², 8.3×10¹², 8.4×10¹², 8.5×10¹², 8.6×10¹², 8.7×10¹², 8.8×10¹², 8.9×10¹², 9×10¹², 1×10¹³, 1.1×10¹³, 1.2×10¹³, 1.3×10¹³, 1.4×10¹³, 1.5×10¹³, 1.6×10¹³, 1.7×10¹³, 1.8×10¹³, 1.9×10¹³, 2×10¹³, 3×10¹³, 4×10¹³, 5×10¹³, 6×10¹³, 6.7×10¹³, 7×10¹³, 8×10¹³, 9×10¹³, 1×10¹⁴, 2×10¹⁴, 3×10¹⁴, 4×10¹⁴, 5×10¹⁴, 6×10¹⁴, 7×10¹⁴, 8×10¹⁴, 9×10¹⁴, 1×10¹⁵, 2×10¹⁵, 3×10¹⁵, 4×10¹⁵, 5×10¹⁵, 6×10¹⁵, 7×10¹⁵, 8×10¹⁵, 9×10¹⁵, or 1×10¹⁶ VG/subject.

[0911] In one embodiment, delivery of compositions in accordance with the present invention to cells may comprise a total concentration per subject between about 1×10⁶ VG/kg and about 1×10¹⁶ VG/kg. In some embodiments, delivery may comprise a composition concentration of about 1×10⁶, 2×10⁶, 3×10⁶, 4×10⁶, 5×10⁶, 6×10⁶, 7×10⁶, 8×10⁶, 9×10⁶, 1×10⁷, 2×10⁷, 3×10⁷, 4×10⁷, 5×10⁷, 6×10⁷, 7×10⁷, 8×10⁷, 9×10⁷, 1×10⁸, 2×10⁸, 3×10⁸, 4×10⁸, 5×10⁸, 6×10⁸, 7×10⁸, 8×10⁸, 9×10⁸, 1×10⁹, 2×10⁹, 3×10⁹, 4×10⁹, 5×10⁹, 6×10⁹, 7×10⁹, 8×10⁹, 9×10⁹, 1×10¹⁰, 2×10¹⁰, 3×10¹⁰, 4×10¹⁰, 5×10¹⁰, 6×10¹⁰, 7×10¹⁰, 8×10¹⁰, 9×10¹⁰, 1×10¹¹, 1.1×10¹¹, 1.2×10¹¹, 1.3×10¹¹, 1.4×10¹¹, 1.5×10¹¹, 1.6×10¹¹, 1.7×10¹¹, 1.8×10¹¹, 1.9×10¹¹, 2×10¹¹, 2.1×10¹¹, 2.2×10¹¹, 2.3×10¹¹, 2.4×10¹¹, 2.5×10¹¹, 2.6×10¹¹, 2.7×10¹¹, 2.8×10¹¹, 2.9×10¹¹, 3×10¹¹, 4×10¹¹, 5×10¹¹, 6×10¹¹, 7×10¹¹, 7.1×10¹¹, 7.2×10¹¹, 7.3×10¹¹, 7.4×10¹¹, 7.5×10¹¹, 7.6×10¹¹, 7.7×10¹¹, 7.8×10¹¹, 7.9×10¹¹, 8×10¹¹, 9×10¹¹, 1×10¹², 1.1×10¹², 1.2×10¹², 1.3×10¹², 1.4×10¹², 1.5×10¹², 1.6×10¹², 1.7×10¹², 1.8×10¹², 1.9×10¹², 2×10¹², 2.1×10¹², 2.2×10¹², 2.3×10¹², 2.4×10¹², 2.5×10¹², 2.6×10¹², 2.7×10¹², 2.8×10¹², 2.9×10¹², 3×10¹², 3.1×10¹², 3.2×10¹², 3.3×10¹², 3.4×10¹², 3.5×10¹², 3.6×10¹², 3.7×10¹², 3.8×10¹², 3.9×10¹², 4×10¹², 4.1×10¹², 4.2×10¹², 4.3×10¹², 4.4×10¹², 4.5×10¹², 4.6×10¹², 4.7×10¹², 4.8×10¹², 4.9×10¹², 5×10¹², 6×10¹², 6.1×10¹², 6.2×10¹², 6.3×10¹², 6.4×10¹², 6.5×10¹², 6.6×10¹², 6.7×10¹², 6.8×10¹², 6.9×10¹², 7×10¹², 8×10¹², 8.1×10¹², 8.2×10¹², 8.3×10¹², 8.4×10¹², 8.5×10¹², 8.6×10¹², 8.7×10¹², 8.8×10¹², 8.9×10¹², 9×10¹², 1×10¹³, 1.1×10¹³, 1.2×10¹³, 1.3×10¹³, 1.4×10¹³, 1.5×10¹³, 1.6×10¹³, 1.7×10¹³, 1.8×10¹³, 1.9×10¹³, 2×10¹³, 3×10¹³, 4×10¹³, 5×10¹³, 6×10¹³, 6.7×10¹³, 7×10¹³, 8×10¹³, 9×10¹³, 1×10¹⁴, 2×10¹⁴, 3×10¹⁴, 4×10¹⁴, 5×10¹⁴, 6×10¹⁴, 7×10¹⁴, 8×10¹⁴, 9×10¹⁴, 1×10¹⁵, 2×10¹⁵, 3×10¹⁵, 4×10¹⁵, 5×10¹⁵, 6×10¹⁵, 7×10¹⁵, 8×10¹⁵, 9×10¹⁵, or 1×10¹⁶ VG/kg.

[0912] In one embodiment, about 10⁵ to 10⁶ viral genome (unit) may be administered per dose.

[0913] In one embodiment, delivery of the compositions in accordance with the present invention to cells may comprise a total concentration between about 1×10⁶ VG/mL and about 1×10¹⁶ VG/mL. In some embodiments, delivery may comprise a composition concentration of about 1×10⁶, 2×10⁶, 3×10⁶, 4×10⁶, 5×10⁶, 6×10⁶, 7×10⁶, 8×10⁶, 9×10⁶, 1×10⁷, 2×10⁷, 3×10⁷, 4×10⁷, 5×10⁷, 6×10⁷, 7×10⁷, 8×10⁷, 9×10⁷, 1×10⁸, 2×10⁸, 3×10⁸, 4×10⁸, 5×10⁸, 6×10⁸, 7×10⁸, 8×10⁸, 9×10⁸, 1×10⁹, 2×10⁹, 3×10⁹, 4×10⁹, 5×10⁹, 6×10⁹, 7×10⁹, 8×10⁹, 9×10⁹, 1×10¹⁰, 2×10¹⁰, 3×10¹⁰, 4×10¹⁰, 5×10¹⁰, 6×10¹⁰, 7×10¹⁰, 8×10¹⁰, 9×10¹⁰, 1×10¹¹, 1.1×10¹¹, 1.2×10¹¹, 1.3×10¹¹, 1.4×10¹¹, 1.5×10¹¹, 1.6×10¹¹, 1.7×10¹¹, 1.8×10¹¹, 1.9×10¹¹, 2×10¹¹, 3×10¹¹, 4×10¹¹, 5×10¹¹, 6×10¹¹, 7×10¹¹, 8×10¹¹, 9×10¹¹, 1×10¹², 1.1×10¹², 1.2×10¹², 1.3×10¹², 1.4×10¹², 1.5×10¹², 1.6×10¹², 1.7×10¹², 1.8×10¹², 1.9×10¹², 2×10¹², 2.1×10¹², 2.2×10¹², 2.3×10¹², 2.4×10¹², 2.5×10¹², 2.6×10¹², 2.7×10¹², 2.8×10¹², 2.9×10¹², 3×10¹², 3.1×10¹², 3.2×10¹², 3.3×10¹², 3.4×10¹², 3.5×10¹², 3.6×10¹², 3.7×10¹², 3.8×10¹², 3.9×10¹², 4×10¹², 4.1×10¹², 4.2×10¹², 4.3×10¹², 4.4×10¹², 4.5×10¹², 4.6×10¹², 4.7×10¹², 4.8×10¹², 4.9×10¹², 5×10¹², 6×10¹², 6.1×10¹², 6.2×10¹², 6.3×10¹², 6.4×10¹², 6.5×10¹², 6.6×10¹², 6.7×10¹², 6.8×10¹², 6.9×10¹², 7×10¹², 8×10¹², 9×10¹², 1×10¹³, 1.1×10¹³, 1.2×10¹³, 1.3×10¹³, 1.4×10¹³, 1.5×10¹³, 1.6×10¹³, 1.7×10¹³, 1.8×10¹³, 1.9×10¹³, 2×10¹³, 3×10¹³, 4×10¹³, 5×10¹³, 6×10¹³, 6.7×10¹³, 7×10¹³, 8×10¹³, 9×10¹³, 1×10¹⁴, 2×10¹⁴, 3×10¹⁴, 4×10¹⁴, 5×10¹⁴, 6×10¹⁴, 7×10¹⁴, 8×10¹⁴, 9×10¹⁴, 1×10¹⁵, 2×10¹⁵, 3×10¹⁵, 4×10¹⁵, 5×10¹⁵, 6×10¹⁵, 7×10¹⁵, 8×10¹⁵, 9×10¹⁵, or 1×10¹⁶ VG/mL.

### Bioavailability

[0914] Viral vectors comprising a modulatory polynucleotide of the present invention, when formulated into compositions with delivery/formulation agents or vehicles as described herein, may exhibit increased bioavailability as compared to compositions lacking delivery agents as described herein. As used herein, the term “bioavailability” refers to the systemic availability of a given amount of a particular agent administered to a subject. Bioavailability may be assessed by measuring the area under the curve (AUC) or the maximum serum or plasma concentration (Cₘₐₓ) of the unchanged form of a compound following administration of the compound to a mammal. AUC is a determination of the area under the curve plotting the serum or plasma concentration of a compound along the ordinate (Y-axis) against time along the abscissa (X-axis). Generally, the AUC for a particular compound may be calculated using methods known to those of ordinary skill in the art and as described in G. S. Banker, Modern Pharmaceutics, Drugs and the Pharmaceutical Sciences, v. 72, Marcel Dekker, New York, Inc., 1996, the contents of which are herein incorporated by reference in their entirety.

[0915] Cₘₐₓ values are maximum concentrations of compounds achieved in serum or plasma of a subject following administration of compounds to the subject. Cₘₐₓ values of particular compounds may be measured using methods known to those of ordinary skill in the art. As used herein, the phrases “increasing bioavailability” or “improving the pharmacokinetics,” refer to actions that may increase the systemic availability of a viral vector of the present invention (as measured by AUC, Cₘₐₓ, or Cₘᵢₙ) in a subject. In some embodiments, such actions may comprise co-administration with one or more delivery agents as described herein. In some embodiments, the bioavailability of viral vectors may increase by at least about 2%, at least about 5%, at least about 10%, at least about 15%, at least about 20%, at least about 25%, at least about 30%, at least about 35%, at least about 40%, at least about 45%, at least about 50%, at least about 55%, at least about 60%, at least about 65%, at least about 70%, at least about 75%, at least about 80%, at least about 85%, at least about 90%, at least about 95% or about 100%.

### Therapeutic Window

[0916] Viral vectors comprising a modulatory polynucleotide of the present invention, when formulated with one or more delivery agents as described herein, may exhibit increases in the therapeutic window of compound and/or composition administration as compared to the therapeutic window of viral vectors administered without one or more delivery agents as described herein. As used herein, the term “therapeutic window” refers to the range of plasma concentrations, or the range of levels of therapeutically active substance at the site of action, with a high probability of eliciting a therapeutic effect. In some embodiments, therapeutic windows of viral vectors when administered in a formulation may increase by at least about 2%, at least about 5%, at least about 10%, at least about 15%, at least about 20%, at least about 25%, at least about 30%, at least about 35%, at least about 40%, at least about 45%, at least about 50%, at least about 55%, at least about 60%, at least about 65%, at least about 70%, at least about 75%, at least about 80%, at least about 85%, at least about 90%, at least about 95% or about 100%.

### Volume of Distribution

[0917] Viral vectors comprising a modulatory polynucleotide of the present invention, when formulated with one or more delivery agents as described herein, may exhibit an improved volume of distribution (V_{dist}), e.g., reduced or targeted, relative to formulations lacking one or more delivery agents as described herein. V_{dist} relates the amount of an agent in the body to the concentration of the same agent in the blood or plasma. As used herein, the term “volume of distribution” refers to the fluid volume that would be required to contain the total amount of an agent in the body at the same concentration as in the blood or plasma: V_{dist} equals the amount of an agent in the body/concentration of the agent in blood or plasma. For example, for a 10 mg dose of a given agent and a plasma concentration of 10 mg/L, the volume of distribution would be 1 liter. The volume of distribution reflects the extent to which an agent is present in the extravascular tissue. Large volumes of distribution reflect the tendency of agents to bind to the tissue components as compared with plasma proteins. In clinical settings, V_{dist} may be used to determine loading doses to achieve steady state concentrations. In some embodiments, volumes of distribution of viral vector compositions of the present invention when co-administered with one or more delivery agents as described herein may decrease at least about 2%, at least about 5%, at least about 10%, at least about 15%, at least about 20%, at least about 25%, at least about 30%, at least about 35%, at least about 40%, at least about 45%, at least about 50%, at least about 55%, at least about 60%, at least about 65%, at least about 70%.

### Combinations

[0918] The viral vectors comprising the modulatory polynucleotide may be used in combination with one or more other therapeutic, prophylactic, diagnostic, or imaging agents. By “in combination with,” it is not intended to imply that the agents must be administered at the same time and/or formulated for delivery together, although these methods of delivery are within the scope of the present disclosure. Compositions can be administered concurrently with, prior to, or subsequent to, one or more other desired therapeutics or medical procedures. In general, each agent will be administered at a dose and/or on a time schedule determined for that agent. In some embodiments, the present disclosure encompasses the delivery of pharmaceutical, prophylactic, diagnostic, or imaging compositions in combination with agents that may improve their bioavailability, reduce and/or modify their metabolism, inhibit their excretion, and/or modify their distribution within the body.

### IV. Methods of Use

### Reduce Expression of a Target Gene

[0919] In some embodiments, the present invention provides methods for inhibiting/silencing gene expression in a cell. Accordingly, the modulatory polynucleotides encoding siRNA duplexes or encoded dsRNA can be used to substantially inhibit gene expression in a cell, in particular in a neuron. In some aspects, the inhibition of gene expression refers to an inhibition by at least about 15%, such as by at least about 16%, 17%, 18%, 19%, 20%, 21%, 22%, 23%, 24%, 25%, 26%, 27%, 28%, 29%, 30%, 31%, 32%, 33%, 34%, 35%, 36%, 37%, 38%, 39%, 40%, 41%, 42%, 43%, 44%, 45%, 46%, 47%, 48%, 49%, 50%, 51%, 52%, 53%, 54%, 55%, 56%, 57%, 58%, 59%, 60%, 61%, 62%, 63%, 64%, 65%, 66%, 67%, 68%, 69%, 70%, 71%, 72%, 73%, 74%, 75%, 76%, 77%, 78%, 79%, 80%, 85%, 90%, 95% and 100%, or at least 15-20%, 15-30%, 15-40%, 15-50%, 15-60%, 15-70%, 15-80%, 15-90%, 15-95%, 20-30%, 20-40%, 20-50%, 20-60%, 20-70%, 20-80%, 20-90%, 20-95%, 20-100%, 30-40%, 30-50%, 30-60%, 30-70%, 30-80%, 30-90%, 30-95%, 30-100%, 40-50%, 40-60%, 40-70%, 40-80%, 40-90%, 40-95%, 40-100%, 50-60%, 50-70%, 50-80%, 50-90%, 50-95%, 50-100%, 55-60%, 55-70%, 55-80%, 55-90%, 55-95%, 55-100%, 60-70%, 60-80%, 60-90%, 60-95%, 60-100%, 70-80%, 70-90%, 70-95%, 70-100%, 80-90%, 80-95%, 80-100%, 90-95%, 90-100% or 95-100%. Accordingly, the protein product of the targeted gene may be inhibited by at least about 15%, preferably by at least about 16%, 17%, 18%, 19%, 20%, 21%, 22%, 23%, 24%, 25%, 26%, 27%, 28%, 29%, 30%, 31%, 32%, 33%, 34%, 35%, 36%, 37%, 38%, 39%, 40%, 41%, 42%, 43%, 44%, 45%, 46%, 47%, 48%, 49%, 50%, 51%, 52%, 53%, 54%, 55%, 56%, 57%, 58%, 59%, 60%, 61%, 62%, 63%, 64%, 65%, 66%, 67%, 68%, 69%, 70%, 71%, 72%, 73%, 74%, 75%, 76%, 77%, 78%, 79%, 80%, 85%, 90%, 95% and 100%, or at least 15-20%, 15-30%, 15-40%, 15-50%, 15-60%, 15-70%, 15-80%, 15-90%, 15-95%, 20-30%, 20-40%, 20-50%, 20-60%, 20-70%, 20-80%, 20-90%, 20-95%, 20-100%, 30-40%, 30-50%, 30-60%, 30-70%, 30-80%, 30-90%, 30-95%, 30-100%, 40-50%, 40-60%, 40-70%, 40-80%, 40-90%, 40-95%, 40-100%, 50-60%, 50-70%, 50-80%, 50-90%, 50-95%, 50-100%, 60-70%, 60-80%, 60-90%, 60-95%, 60-100%, 70-80%, 70-90%, 70-95%, 70-100%, 80-90%, 80-95%, 80-100%, 90-95%, 90-100% or 95-100%.

[0920] In some embodiments, the present invention provides methods for inhibiting/silencing gene expression in a cell, in particular in a medium spiny neuron. In some aspects, the inhibition of gene expression refers to an inhibition by at least about 15%, such as by at least about 16%, 17%, 18%, 19%, 20%, 21%, 22%, 23%, 24%, 25%, 26%, 27%, 28%, 29%, 30%, 31%, 32%, 33%, 34%, 35%, 36%, 37%, 38%, 39%, 40%, 41%, 42%, 43%, 44%, 45%, 46%, 47%, 48%, 49%, 50%, 51%, 52%, 53%, 54%, 55%, 56%, 57%, 58%, 59%, 60%, 61%, 62%, 63%, 64%, 65%, 66%, 67%, 68%, 69%, 70%, 71%, 72%, 73%, 74%, 75%, 76%, 77%, 78%, 79%, 80%, 85%, 90%, 95% and 100%, or at least 15-20%, 15-30%, 15-40%, 15-50%, 15-60%, 15-70%, 15-80%, 15-90%, 15-95%, 20-30%, 20-40%, 20-50%, 20-60%, 20-70%, 20-80%, 20-90%, 20-95%, 20-100%, 30-40%, 30-50%, 30-60%, 30-70%, 30-80%, 30-90%, 30-95%, 30-100%, 40-50%, 40-60%, 40-70%, 40-80%, 40-90%, 40-95%, 40-100%, 50-60%, 50-70%, 50-80%, 50-90%, 50-95%, 50-100%, 55-60%, 55-70%, 55-80%, 55-90%, 55-95%, 55-100%, 60-70%, 60-80%, 60-90%, 60-95%, 60-100%, 70-80%, 70-90%, 70-95%, 70-100%, 80-90%, 80-95%, 80-100%, 90-95%, 90-100% or 95-100%. Accordingly, the protein product of the targeted gene may be inhibited by at least about 15%, preferably by at least about 16%, 17%, 18%, 19%, 20%, 21%, 22%, 23%, 24%, 25%, 26%, 27%, 28%, 29%, 30%, 31%, 32%, 33%, 34%, 35%, 36%, 37%, 38%, 39%, 40%, 41%, 42%, 43%, 44%, 45%, 46%, 47%, 48%, 49%, 50%, 51%, 52%, 53%, 54%, 55%, 56%, 57%, 58%, 59%, 60%, 61%, 62%, 63%, 64%, 65%, 66%, 67%, 68%, 69%, 70%, 71%, 72%, 73%, 74%, 75%, 76%, 77%, 78%, 79%, 80%, 85%, 90%, 95% and 100%, or at least 15-20%, 15-30%, 15-40%, 15-50%, 15-60%, 15-70%, 15-80%, 15-90%, 15-95%, 20-30%, 20-40%, 20-50%, 20-60%, 20-70%, 20-80%, 20-90%, 20-95%, 20-100%, 30-40%, 30-50%, 30-60%, 30-70%, 30-80%, 30-90%, 30-95%, 30-100%, 40-50%, 40-60%, 40-70%, 40-80%, 40-90%, 40-95%, 40-100%, 50-60%, 50-70%, 50-80%, 50-90%, 50-95%, 50-100%, 55-60%, 55-70%, 55-80%, 55-90%, 55-95%, 55-100%, 60-70%, 60-80%, 60-90%, 60-95%, 60-100%, 70-80%, 70-90%, 70-95%, 70-100%, 80-90%, 80-95%, 80-100%, 90-95%, 90-100% or 95-100%.

[0921] In some embodiments, the present invention provides methods for inhibiting/silencing gene expression in a cell, in particular in a motor neuron. In some aspects, the inhibition of gene expression refers to an inhibition by at least about 15%, such as by at least about 16%, 17%, 18%, 19%, 20%, 21%, 22%, 23%, 24%, 25%, 26%, 27%, 28%, 29%, 30%, 31%, 32%, 33%, 34%, 35%, 36%, 37%, 38%, 39%, 40%, 41%, 42%, 43%, 44%, 45%, 46%, 47%, 48%, 49%, 50%, 51%, 52%, 53%, 54%, 55%, 56%, 57%, 58%, 59%, 60%, 61%, 62%, 63%, 64%, 65%, 66%, 67%, 68%, 69%, 70%, 71%, 72%, 73%, 74%, 75%, 76%, 77%, 78%, 79%, 80%, 85%, 90%, 95% and 100%, or at least 15-20%, 15-30%, 15-40%, 15-50%, 15-60%, 15-70%, 15-80%, 15-90%, 15-95%, 20-30%, 20-40%, 20-50%, 20-60%, 20-70%, 20-80%, 20-90%, 20-95%, 20-100%, 30-40%, 30-50%, 30-60%, 30-70%, 30-80%, 30-90%, 30-95%, 30-100%, 40-50%, 40-60%, 40-70%, 40-80%, 40-90%, 40-95%, 40-100%, 50-60%, 50-70%, 50-80%, 50-90%, 50-95%, 50-100%, 55-60%, 55-70%, 55-80%, 55-90%, 55-95%, 55-100%, 60-70%, 60-80%, 60-90%, 60-95%, 60-100%, 70-80%, 70-90%, 70-95%, 70-100%, 80-90%, 80-95%, 80-100%, 90-95%, 90-100% or 95-100%. Accordingly, the protein product of the targeted gene may be inhibited by at least about 15%, preferably by at least about 16%, 17%, 18%, 19%, 20%, 21%, 22%, 23%, 24%, 25%, 26%, 27%, 28%, 29%, 30%, 31%, 32%, 33%, 34%, 35%, 36%, 37%, 38%, 39%, 40%, 41%, 42%, 43%, 44%, 45%, 46%, 47%, 48%, 49%, 50%, 51%, 52%, 53%, 54%, 55%, 56%, 57%, 58%, 59%, 60%, 61%, 62%, 63%, 64%, 65%, 66%, 67%, 68%, 69%, 70%, 71%, 72%, 73%, 74%, 75%, 76%, 77%, 78%, 79%, 80%, 85%, 90%, 95% and 100%, or at least 15-20%, 15-30%, 15-40%, 15-50%, 15-60%, 15-70%, 15-80%, 15-90%, 15-95%, 20-30%, 20-40%, 20-50%, 20-60%, 20-70%, 20-80%, 20-90%, 20-95%, 20-100%, 30-40%, 30-50%, 30-60%, 30-70%, 30-80%, 30-90%, 30-95%, 30-100%, 40-50%, 40-60%, 40-70%, 40-80%, 40-90%, 40-95%, 40-100%, 50-60%, 50-70%, 50-80%, 50-90%, 50-95%, 50-100%, 55-60%, 55-70%, 55-80%, 55-90%, 55-95%, 55-100%, 60-70%, 60-80%, 60-90%, 60-95%, 60-100%, 70-80%, 70-90%, 70-95%, 70-100%, 80-90%, 80-95%, 80-100%, 90-95%, 90-100% or 95-100%.

[0922] In some embodiments, the present invention provides methods for inhibiting/silencing gene expression in a cell, in particular in an astrocyte. In some aspects, the inhibition of gene expression refers to an inhibition by at least about 15%, such as by at least about 16%, 17%, 18%, 19%, 20%, 21%, 22%, 23%, 24%, 25%, 26%, 27%, 28%, 29%, 30%, 31%, 32%, 33%, 34%, 35%, 36%, 37%, 38%, 39%, 40%, 41%, 42%, 43%, 44%, 45%, 46%, 47%, 48%, 49%, 50%, 51%, 52%, 53%, 54%, 55%, 56%, 57%, 58%, 59%, 60%, 61%, 62%, 63%, 64%, 65%, 66%, 67%, 68%, 69%, 70%, 71%, 72%, 73%, 74%, 75%, 76%, 77%, 78%, 79%, 80%, 85%, 90%, 95% and 100%, or at least 15-20%, 15-30%, 15-40%, 15-50%, 15-60%, 15-70%, 15-80%, 15-90%, 15-95%, 20-30%, 20-40%, 20-50%, 20-60%, 20-70%, 20-80%, 20-90%, 20-95%, 20-100%, 30-40%, 30-50%, 30-60%, 30-70%, 30-80%, 30-90%, 30-95%, 30-100%, 40-50%, 40-60%, 40-70%, 40-80%, 40-90%, 40-95%, 40-100%, 50-60%, 50-70%, 50-80%, 50-90%, 50-95%, 50-100%, 55-60%, 55-70%, 55-80%, 55-90%, 55-95%, 55-100%, 60-70%, 60-80%, 60-90%, 60-95%, 60-100%, 70-80%, 70-90%, 70-95%, 70-100%, 80-90%, 80-95%, 80-100%, 90-95%, 90-100% or 95-100%. Accordingly, the protein product of the targeted gene may be inhibited by at least about 15%, preferably by at least about 16%, 17%, 18%, 19%, 20%, 21%, 22%, 23%, 24%, 25%, 26%, 27%, 28%, 29%, 30%, 31%, 32%, 33%, 34%, 35%, 36%, 37%, 38%, 39%, 40%, 41%, 42%, 43%, 44%, 45%, 46%, 47%, 48%, 49%, 50%, 51%, 52%, 53%, 54%, 55%, 56%, 57%, 58%, 59%, 60%, 61%, 62%, 63%, 64%, 65%, 66%, 67%, 68%, 69%, 70%, 71%, 72%, 73%, 74%, 75%, 76%, 77%, 78%, 79%, 80%, 85%, 90%, 95% and 100%, or at least 15-20%, 15-30%, 15-40%, 15-50%, 15-60%, 15-70%, 15-80%, 15-90%, 15-95%, 20-30%, 20-40%, 20-50%, 20-60%, 20-70%, 20-80%, 20-90%, 20-95%, 20-100%, 30-40%, 30-50%, 30-60%, 30-70%, 30-80%, 30-90%, 30-95%, 30-100%, 40-50%, 40-60%, 40-70%, 40-80%, 40-90%, 40-95%, 40-100%, 50-60%, 50-70%, 50-80%, 50-90%, 50-95%, 50-100%, 55-60%, 55-70%, 55-80%, 55-90%, 55-95%, 55-100%, 60-70%, 60-80%, 60-90%, 60-95%, 60-100%, 70-80%, 70-90%, 70-95%, 70-100%, 80-90%, 80-95%, 80-100%, 90-95%, 90-100% or 95-100%.

[0923] In one embodiment, the siRNA duplexes or encoded dsRNA may be used to reduce the expression of protein by at least about 15%, 16%, 17%, 18%, 19%, 20%, 21%, 22%, 23%, 24%, 25%, 26%, 27%, 28%, 29%, 30%, 31%, 32%, 33%, 34%, 35%, 36%, 37%, 38%, 39%, 40%, 41%, 42%, 43%, 44%, 45%, 46%, 47%, 48%, 49%, 50%, 51%, 52%, 53%, 54%, 55%, 56%, 57%, 58%, 59%, 60%, 61%, 62%, 63%, 64%, 65%, 66%, 67%, 68%, 69%, 70%, 71%, 72%, 73%, 74%, 75%, 76%, 77%, 78%, 79%, 80%, 85%, 90%, 95% and 100%, or at least 15-20%, 15-30%, 15-40%, 15-50%, 15-60%, 15-70%, 15-80%, 15-90%, 15-95%, 20-30%, 20-40%, 20-50%, 20-60%, 20-70%, 20-80%, 20-90%, 20-95%, 20-100%, 30-40%, 30-50%, 30-60%, 30-70%, 30-80%, 30-90%, 30-95%, 30-100%, 40-50%, 40-60%, 40-70%, 40-80%, 40-90%, 40-95%, 40-100%, 50-60%, 50-70%, 50-80%, 50-90%, 50-95%, 50-100%, 55-60%, 55-70%, 55-80%, 55-90%, 55-95%, 55-100%, 60-70%, 60-80%, 60-90%, 60-95%, 60-100%, 70-80%, 70-90%, 70-95%, 70-100%, 80-90%, 80-95%, 80-100%, 90-95%, 90-100% or 95-100%. As a non-limiting example, the expression of protein expression may be reduced by 50-90%. As a non-limiting example, the expression of protein expression may be reduced by 30-70%. As a non-limiting example, the expression of protein expression may be reduced by 20-70%. As a non-limiting example, the expression of protein expression may be reduced by 15-30%.

[0924] In one embodiment, the modulatory polynucleotides encoding siRNA duplexes or encoded dsRNA may be used to reduce the expression of mRNA by at least about 15%, 16%, 17%, 18%, 19%, 20%, 21%, 22%, 23%, 24%, 25%, 26%, 27%, 28%, 29%, 30%, 31%, 32%, 33%, 34%, 35%, 36%, 37%, 38%, 39%, 40%, 41%, 42%, 43%, 44%, 45%, 46%, 47%, 48%, 49%, 50%, 51%, 52%, 53%, 54%, 55%, 56%, 57%, 58%, 59%, 60%, 61%, 62%, 63%, 64%, 65%, 66%, 67%, 68%, 69%, 70%, 71%, 72%, 73%, 74%, 75%, 76%, 77%, 78%, 79%, 80%, 85%, 90%, 95% and 100%, or at least 15-20%, 15-30%, 15-40%, 15-50%, 15-60%, 15-70%, 15-80%, 15-90%, 15-95%, 20-30%, 20-40%, 20-50%, 20-60%, 20-70%, 20-80%, 20-90%, 20-95%, 20-100%, 30-40%, 30-50%, 30-60%, 30-70%, 30-80%, 30-90%, 30-95%, 30-100%, 40-50%, 40-60%, 40-70%, 40-80%, 40-90%, 40-95%, 40-100%, 50-60%, 50-70%, 50-80%, 50-90%, 50-95%, 50-100%, 55-60%, 55-70%, 55-80%, 55-90%, 55-95%, 55-100%, 60-70%, 60-80%, 60-90%, 60-95%, 60-100%, 70-80%, 70-90%, 70-95%, 70-100%, 80-90%, 80-95%, 80-100%, 90-95%, 90-100% or 95-100%. As a non-limiting example, the expression of mRNA expression may be reduced by 50-90%. As a non-limiting example, the expression of mRNA expression may be reduced by 30-70%. As a non-limiting example, the expression of mRNA expression may be reduced by 20-70%. As a non-limiting example, the expression of mRNA expression may be reduced by 15-30%.

[0925] In one embodiment, the siRNA duplexes or encoded dsRNA may be used to reduce the expression of protein and/or mRNA in at least one region of the CNS such as, but not limited to the midbrain. The expression of protein and/or mRNA is reduced by at least about 15%, 16%, 17%, 18%, 19%, 20%, 21%, 22%, 23%, 24%, 25%, 26%, 27%, 28%, 29%, 30%, 31%, 32%, 33%, 34%, 35%, 36%, 37%, 38%, 39%, 40%, 41%, 42%, 43%, 44%, 45%, 46%, 47%, 48%, 49%, 50%, 51%, 52%, 53%, 54%, 55%, 56%, 57%, 58%, 59%, 60%, 61%, 62%, 63%, 64%, 65%, 66%, 67%, 68%, 69%, 70%, 71%, 72%, 73%, 74%, 75%, 76%, 77%, 78%, 79%, 80%, 85%, 90%, 95% and 100%, or at least 15-20%, 15-30%, 15-40%, 15-50%, 15-60%, 15-70%, 15-80%, 15-90%, 15-95%, 20-30%, 20-40%, 20-50%, 20-60%, 20-70%, 20-80%, 20-90%, 20-95%, 20-100%, 30-40%, 30-50%, 30-60%, 30-70%, 30-80%, 30-90%, 30-95%, 30-100%, 40-50%, 40-60%, 40-70%, 40-80%, 40-90%, 40-95%, 40-100%, 50-60%, 50-70%, 50-80%, 50-90%, 50-95%, 50-100%, 55-60%, 55-70%, 55-80%, 55-90%, 55-95%, 55-100%, 60-70%, 60-80%, 60-90%, 60-95%, 60-100%, 70-80%, 70-90%, 70-95%, 70-100%, 80-90%, 80-95%, 80-100%, 90-95%, 90-100% or 95-100% in at least one region of the CNS. As a non-limiting example, the expression of protein and mRNA in the striatum and/or cortex is reduced by 50-90%. As a non-limiting example, the expression of protein and mRNA in the striatum is reduced by 40-50%. As a non-limiting example, the expression of protein and mRNA in the striatum is reduced by 20-50%. As a non-limiting example, the expression of protein and mRNA in the striatum is reduced by 15-50%. As a non-limiting example, the expression of protein and mRNA in the cortex is reduced by 40-50%. As a non-limiting example, the expression of protein and mRNA in the cortex is reduced by 30-70%. As a non-limiting example, the expression of protein and mRNA in the cortex is reduced by 20-70%. As a non-limiting example, the expression of protein and mRNA in the cortex is reduced by 15-70%. As a non-limiting example, the expression of protein and mRNA in the striatum and/or cortex is reduced by 20-70%. As a non-limiting example, the expression of protein and mRNA in the striatum and/or cortex is reduced by 20-70%. As a non-limiting example, the expression of protein and mRNA in the striatum and/or cortex is reduced by 15-70%. As a non-limiting example, the expression of protein and mRNA in the striatum and/or cortex is reduced by 40-70%. As a non-limiting example, the expression of protein and mRNA in the striatum and/or cortex is reduced by 40-50%. As a non-limiting example, the expression of protein and mRNA in the striatum and/or cortex is reduced by 50-70%. As a non-limiting example, the expression of protein and mRNA in the striatum and/or cortex is reduced by 50-60%. As a non-limiting example, the expression of protein and mRNA in the striatum and/or cortex is reduced by 50%. As a non-limiting example, the expression of protein and mRNA in the striatum and/or cortex is reduced by 51%. As a non-limiting example, the expression of protein and mRNA in the striatum and/or cortex is reduced by 52%. As a non-limiting example, the expression of protein and mRNA in the striatum and/or cortex is reduced by 53%. As a non-limiting example, the expression of protein and mRNA in the striatum and/or cortex is reduced by 54%. As a non-limiting example, the expression of protein and mRNA in the striatum and/or cortex is reduced by 55%. As a non-limiting example, the expression of protein and mRNA in the striatum and/or cortex is reduced by 56%. As a non-limiting example, the expression of protein and mRNA in the striatum and/or cortex is reduced by 57%. As a non-limiting example, the expression of protein and mRNA in the striatum and/or cortex is reduced by 58%. As a non-limiting example, the expression of protein and mRNA in the striatum and/or cortex is reduced by 59%. As a non-limiting example, the expression of protein and mRNA in the striatum and/or cortex is reduced by 60%.

[0926] In one embodiment, the modulatory polynucleotides encoding siRNA duplexes or encoded dsRNA may be used to reduce the expression of protein and/or mRNA in at least one region of the CNS such as, but not limited to the forebrain. The expression of protein and/or mRNA is reduced by at least about 15%, 16%, 17%, 18%, 19%, 20%, 21%, 22%, 23%, 24%, 25%, 26%, 27%, 28%, 29%, 30%, 31%, 32%, 33%, 34%, 35%, 36%, 37%, 38%, 39%, 40%, 41%, 42%, 43%, 44%, 45%, 46%, 47%, 48%, 49%, 50%, 51%, 52%, 53%, 54%, 55%, 56%, 57%, 58%, 59%, 60%, 61%, 62%, 63%, 64%, 65%, 66%, 67%, 68%, 69%, 70%, 71%, 72%, 73%, 74%, 75%, 76%, 77%, 78%, 79%, 80%, 85%, 90%, 95% and 100%, or at least 15-20%, 15-30%, 15-40%, 15-50%, 15-60%, 15-70%, 15-80%, 15-90%, 15-95%, 20-30%, 20-40%, 20-50%, 20-60%, 20-70%, 20-80%, 20-90%, 20-95%, 20-100%, 30-40%, 30-50%, 30-60%, 30-70%, 30-80%, 30-90%, 30-95%, 30-100%, 40-50%, 40-60%, 40-70%, 40-80%, 40-90%, 40-95%, 40-100%, 50-60%, 50-70%, 50-80%, 50-90%, 50-95%, 50-100%, 55-60%, 55-70%, 55-80%, 55-90%, 55-95%, 55-100%, 60-70%, 60-80%, 60-90%, 60-95%, 60-100%, 70-80%, 70-90%, 70-95%, 70-100%, 80-90%, 80-95%, 80-100%, 90-95%, 90-100% or 95-100% in at least one region of the CNS. As a non-limiting example, the expression of protein and mRNA in the putamen is reduced by 50-90%. As a non-limiting example, the expression of protein and mRNA in the striatum is reduced by 40-50%. As a non-limiting example, the expression of protein and mRNA in the cortex is reduced by 40-50%. As a non-limiting example, the expression of protein and mRNA in the cortex is reduced by 30-70%. As a non-limiting example, the expression of protein and mRNA in the cortex is reduced by 20-70%. As a non-limiting example, the expression of protein and mRNA in the cortex is reduced by 15-70%. As a non-limiting example, the expression of protein and mRNA in the striatum and/or cortex is reduced by 20-70%. As a non-limiting example, the expression of protein and mRNA in the striatum and/or cortex is reduced by 15-70%. As a non-limiting example, the expression of protein and mRNA in the striatum and/or cortex is reduced by 40-70%. As a non-limiting example, the expression of protein and mRNA in the striatum and/or cortex is reduced by 40-50%. As a non-limiting example, the expression of protein and mRNA in the striatum and/or cortex is reduced by 50-70%. As a non-limiting example, the expression of protein and mRNA in the striatum and/or cortex is reduced by 50-60%. As a non-limiting example, the expression of protein and mRNA in the striatum and/or cortex is reduced by 50%. As a non-limiting example, the expression of protein and mRNA in the striatum and/or cortex is reduced by 51%. As a non-limiting example, the expression of protein and mRNA in the striatum and/or cortex is reduced by 52%. As a non-limiting example, the expression of protein and mRNA in the striatum and/or cortex is reduced by 53%. As a non-limiting example, the expression of protein and mRNA in the striatum and/or cortex is reduced by 54%. As a non-limiting example, the expression of protein and mRNA in the striatum and/or cortex is reduced by 55%. As a non-limiting example, the expression of protein and mRNA in the striatum and/or cortex is reduced by 56%. As a non-limiting example, the expression of protein and mRNA in the striatum and/or cortex is reduced by 57%. As a non-limiting example, the expression of protein and mRNA in the striatum and/or cortex is reduced by 58%. As a non-limiting example, the expression of protein and mRNA in the striatum and/or cortex is reduced by 59%. As a non-limiting example, the expression of protein and mRNA in the striatum and/or cortex is reduced by 60%. As a non-limiting example, the expression of protein and mRNA in the striatum and/or cortex is reduced by 61%. As a non-limiting example, the expression of protein and mRNA in the striatum and/or cortex is reduced by 62%. As a non-limiting example, the expression of protein and mRNA in the striatum and/or cortex is reduced by 63%. As a non-limiting example, the expression of protein and mRNA in the striatum and/or cortex is reduced by 64%. As a non-limiting example, the expression of protein and mRNA in the striatum and/or cortex is reduced by 65%. As a non-limiting example, the expression of protein and mRNA in the striatum and/or cortex is reduced by 66%. As a non-limiting example, the expression of protein and mRNA in the striatum and/or cortex is reduced by 67%. As a non-limiting example, the expression of protein and mRNA in the striatum and/or cortex is reduced by 68%. As a non-limiting example, the expression of protein and mRNA in the striatum and/or cortex is reduced by 69%. As a non-limiting example, the expression of protein and mRNA in the striatum and/or cortex is reduced by 70%.

[0927] In one embodiment, the modulatory polynucleotides encoding siRNA duplexes or encoded dsRNA may be used to reduce the expression of protein and/or mRNA in the putamen. The expression of protein and/or mRNA is reduced by at least about 15%, 16%, 17%, 18%, 19%, 20%, 21%, 22%, 23%, 24%, 25%, 26%, 27%, 28%, 29%, 30%, 31%, 32%, 33%, 34%, 35%, 36%, 37%, 38%, 39%, 40%, 41%, 42%, 43%, 44%, 45%, 46%, 47%, 48%, 49%, 50%, 51%, 52%, 53%, 54%, 55%, 56%, 57%, 58%, 59%, 60%, 61%, 62%, 63%, 64%, 65%, 66%, 67%, 68%, 69%, 70%, 71%, 72%, 73%, 74%, 75%, 76%, 77%, 78%, 79%, 80%, 85%, 90%, 95% and 100%, or at least 15-20%, 15-30%, 15-40%, 15-50%, 15-60%, 15-70%, 15-80%, 15-90%, 15-95%, 20-30%, 20-40%, 20-50%, 20-60%, 20-70%, 20-80%, 20-90%, 20-95%, 20-100%, 30-40%, 30-50%, 30-60%, 30-70%, 30-80%, 30-90%, 30-95%, 30-100%, 40-50%, 40-60%, 40-70%, 40-80%, 40-90%, 40-95%, 40-100%, 50-60%, 50-70%, 50-80%, 50-90%, 50-95%, 50-100%, 55-60%, 55-70%, 55-80%, 55-90%, 55-95%, 55-100%, 60-70%, 60-80%, 60-90%, 60-95%, 60-100%, 70-80%, 70-90%, 70-95%, 70-100%, 80-90%, 80-95%, 80-100%, 90-95%, 90-100% or 95-100% in at least one region of the CNS. As a non-limiting example, the expression of protein and mRNA in the putamen is reduced by 40-70%. As a non-limiting example, the expression of protein and mRNA in the putamen is reduced by 40-50%. As a non-limiting example, the expression of protein and mRNA in the putamen is reduced by 50-70%. As a non-limiting example, the expression of protein and mRNA in the putamen is reduced by 50-60%. As a non-limiting example, the expression of protein and mRNA in the putamen is reduced by 50%. As a non-limiting example, the expression of protein and mRNA in the putamen is reduced by 51%. As a non-limiting example, the expression of protein and mRNA in the putamen is reduced by 52%. As a non-limiting example, the expression of protein and mRNA in the putamen is reduced by 53%. As a non-limiting example, the expression of protein and mRNA in the putamen is reduced by 54%. As a non-limiting example, the expression of protein and mRNA in the putamen is reduced by 55%. As a non-limiting example, the expression of protein and mRNA in the putamen is reduced by 56%. As a non-limiting example, the expression of protein and mRNA in the putamen is reduced by 57%. As a non-limiting example, the expression of protein and mRNA in the putamen is reduced by 58%. As a non-limiting example, the expression of protein and mRNA in the putamen is reduced by 59%. As a non-limiting example, the expression of protein and mRNA in the putamen is reduced by 60%. As a non-limiting example, the expression of protein and mRNA in the putamen is reduced by 61%. As a non-limiting example, the expression of protein and mRNA in the putamen is reduced by 62%. As a non-limiting example, the expression of protein and mRNA in the putamen is reduced by 63%. As a non-limiting example, the expression of protein and mRNA in the putamen is reduced by 64%. As a non-limiting example, the expression of protein and mRNA in the putamen is reduced by 65%. As a non-limiting example, the expression of protein and mRNA in the putamen is reduced by 66%. As a non-limiting example, the expression of protein and mRNA in the putamen is reduced by 67%. As a non-limiting example, the expression of protein and mRNA in the putamen is reduced by 68%. As a non-limiting example, the expression of protein and mRNA in the putamen is reduced by 69%. As a non-limiting example, the expression of protein and mRNA in the putamen is reduced by 70%.

[0928] In one embodiment, the modulatory polynucleotides encoding siRNA duplexes or encoded dsRNA may be used to reduce the expression of protein and/or mRNA in the cortex. The expression of protein and/or mRNA is reduced by at least about 15%, 16%, 17%, 18%, 19%, 20%, 21%, 22%, 23%, 24%, 25%, 26%, 27%, 28%, 29%, 30%, 31%, 32%, 33%, 34%, 35%, 36%, 37%, 38%, 39%, 40%, 41%, 42%, 43%, 44%, 45%, 46%, 47%, 48%, 49%, 50%, 51%, 52%, 53%, 54%, 55%, 56%, 57%, 58%, 59%, 60%, 61%, 62%, 63%, 64%, 65%, 66%, 67%, 68%, 69%, 70%, 71%, 72%, 73%, 74%, 75%, 76%, 77%, 78%, 79%, 80%, 85%, 90%, 95% and 100%, or at least 15-20%, 15-30%, 15-40%, 15-50%, 15-60%, 15-70%, 15-80%, 15-90%, 15-95%, 20-30%, 20-40%, 20-50%, 20-60%, 20-70%, 20-80%, 20-90%, 20-95%, 20-100%, 30-40%, 30-50%, 30-60%, 30-70%, 30-80%, 30-90%, 30-95%, 30-100%, 40-50%, 40-60%, 40-70%, 40-80%, 40-90%, 40-95%, 40-100%, 50-60%, 50-70%, 50-80%, 50-90%, 50-95%, 50-100%, 60-70%, 60-80%, 60-90%, 60-95%, 60-100%, 70-80%, 70-90%, 70-95%, 70-100%, 80-90%, 80-95%, 80-100%, 90-95%, 90-100% or 95-100%. As a non-limiting example, the expression of protein and mRNA in the cortex is reduced by 40-50%. As a non-limiting example, the expression of protein and mRNA in the cortex is reduced by 30-70%. As a non-limiting example, the expression of protein and mRNA in the cortex is reduced by at least 30%. As a non-limiting example, the expression of protein and mRNA in the cortex is reduced by 40-70%. As a non-limiting example, the expression of protein and mRNA in the cortex is reduced by 40-50%. As a non-limiting example, the expression of protein and mRNA in the cortex is reduced by 50-70%. As a non-limiting example, the expression of protein and mRNA in the cortex is reduced by 50-60%. As a non-limiting example, the expression of protein and mRNA in the cortex is reduced by 50%. As a non-limiting example, the expression of protein and mRNA in the cortex is reduced by 51%. As a non-limiting example, the expression of protein and mRNA in the cortex is reduced by 52%. As a non-limiting example, the expression of protein and mRNA in the cortex is reduced by 53%. As a non-limiting example, the expression of protein and mRNA in the cortex is reduced by 54%. As a non-limiting example, the expression of protein and mRNA in the cortex is reduced by 55%. As a non-limiting example, the expression of protein and mRNA in the cortex is reduced by 56%. As a non-limiting example, the expression of protein and mRNA in the cortex is reduced by 57%. As a non-limiting example, the expression of protein and mRNA in the cortex is reduced by 58%. As a non-limiting example, the expression of protein and mRNA in the cortex is reduced by 59%. As a non-limiting example, the expression of protein and mRNA in the cortex is reduced by 60%. As a non-limiting example, the expression of protein and mRNA in the cortex is reduced by 61%. As a non-limiting example, the expression of protein and mRNA in the cortex is reduced by 62%. As a non-limiting example, the expression of protein and mRNA in the cortex is reduced by 63%. As a non-limiting example, the expression of protein and mRNA in the cortex is reduced by 64%. As a non-limiting example, the expression of protein and mRNA in the cortex is reduced by 65%. As a non-limiting example, the expression of protein and mRNA in the cortex is reduced by 66%. As a non-limiting example, the expression of protein and mRNA in the cortex is reduced by 67%. As a non-limiting example, the expression of protein and mRNA in the cortex is reduced by 68%. As a non-limiting example, the expression of protein and mRNA in the cortex is reduced by 69%. As a non-limiting example, the expression of protein and mRNA in the cortex is reduced by 70%.

[0929] In one embodiment, the modulatory polynucleotides encoding siRNA duplexes or encoded dsRNA may be used to reduce the expression of protein and/or mRNA in the motor cortex. The expression of protein and/or mRNA is reduced by at least about 15%, 16%, 17%, 18%, 19%, 20%, 21%, 22%, 23%, 24%, 25%, 26%, 27%, 28%, 29%, 30%, 31%, 32%, 33%, 34%, 35%, 36%, 37%, 38%, 39%, 40%, 41%, 42%, 43%, 44%, 45%, 46%, 47%, 48%, 49%, 50%, 51%, 52%, 53%, 54%, 55%, 56%, 57%, 58%, 59%, 60%, 61%, 62%, 63%, 64%, 65%, 66%, 67%, 68%, 69%, 70%, 71%, 72%, 73%, 74%, 75%, 76%, 77%, 78%, 79%, 80%, 85%, 90%, 95% and 100%, or at least 15-20%, 15-30%, 15-40%, 15-50%, 15-60%, 15-70%, 15-80%, 15-90%, 15-95%, 20-30%, 20-40%, 20-50%, 20-60%, 20-70%, 20-80%, 20-90%, 20-95%, 20-100%, 30-40%, 30-50%, 30-60%, 30-70%, 30-80%, 30-90%, 30-95%, 30-100%, 40-50%, 40-60%, 40-70%, 40-80%, 40-90%, 40-95%, 40-100%, 50-60%, 50-70%, 50-80%, 50-90%, 50-95%, 50-100%, 60-70%, 60-80%, 60-90%, 60-95%, 60-100%, 70-80%, 70-90%, 70-95%, 70-100%, 80-90%, 80-95%, 80-100%, 90-95%, 90-100% or 95-100%. As a non-limiting example, the expression of protein and mRNA in the motor cortex is reduced by 40-50%. As a non-limiting example, the expression of protein and mRNA in the motor cortex is reduced by 30-70%. As a non-limiting example, the expression of protein and mRNA in the motor cortex is reduced by 20-70%. As a non-limiting example, the expression of protein and mRNA in the motor cortex is reduced by 15-70%. As a non-limiting example, the expression of protein and mRNA in the motor cortex is reduced by at least 30%. As a non-limiting example, the expression of protein and mRNA in the motor cortex is reduced by 40-70%. As a non-limiting example, the expression of protein and mRNA in the motor cortex is reduced by 50-70%. As a non-limiting example, the expression of protein and mRNA in the motor cortex is reduced by 50-60%. As a non-limiting example, the expression of protein and mRNA in the motor cortex is reduced by 50%. As a non-limiting example, the expression of protein and mRNA in the motor cortex is reduced by 51%. As a non-limiting example, the expression of protein and mRNA in the motor cortex is reduced by 52%. As a non-limiting example, the expression of protein and mRNA in the motor cortex is reduced by 53%. As a non-limiting example, the expression of protein and mRNA in the motor cortex is reduced by 54%. As a non-limiting example, the expression of protein and mRNA in the motor cortex is reduced by 55%. As a non-limiting example, the expression of protein and mRNA in the motor cortex is reduced by 56%. As a non-limiting example, the expression of protein and mRNA in the motor cortex is reduced by 57%. As a non-limiting example, the expression of protein and mRNA in the motor cortex is reduced by 58%. As a non-limiting example, the expression of protein and mRNA in the motor cortex is reduced by 59%. As a non-limiting example, the expression of protein and mRNA in the motor cortex is reduced by 60%. As a non-limiting example, the expression of protein and mRNA in the motor cortex is reduced by 61%. As a non-limiting example, the expression of protein and mRNA in the motor cortex is reduced by 62%. As a non-limiting example, the expression of protein and mRNA in the motor cortex is reduced by 63%. As a non-limiting example, the expression of protein and mRNA in the motor cortex is reduced by 64%. As a non-limiting example, the expression of protein and mRNA in the motor cortex is reduced by 65%. As a non-limiting example, the expression of protein and mRNA in the motor cortex is reduced by 66%. As a non-limiting example, the expression of protein and mRNA in the motor cortex is reduced by 67%. As a non-limiting example, the expression of protein and mRNA in the motor cortex is reduced by 68%. As a non-limiting example, the expression of protein and mRNA in the motor cortex is reduced by 69%. As a non-limiting example, the expression of protein and mRNA in the motor cortex is reduced by 70%.

[0930] In one embodiment, the modulatory polynucleotides encoding siRNA duplexes or encoded dsRNA may be used to reduce the expression of protein and/or mRNA in the somatosensory cortex. The expression of protein and/or mRNA is reduced by at least about 15%, 16%, 17%, 18%, 19%, 20%, 21%, 22%, 23%, 24%, 25%, 26%, 27%, 28%, 29%, 30%, 31%, 32%, 33%, 34%, 35%, 36%, 37%, 38%, 39%, 40%, 41%, 42%, 43%, 44%, 45%, 46%, 47%, 48%, 49%, 50%, 51%, 52%, 53%, 54%, 55%, 56%, 57%, 58%, 59%, 60%, 61%, 62%, 63%, 64%, 65%, 66%, 67%, 68%, 69%, 70%, 71%, 72%, 73%, 74%, 75%, 76%, 77%, 78%, 79%, 80%, 85%, 90%, 95% and 100%, or at least 15-20%, 15-30%, 15-40%, 15-50%, 15-60%, 15-70%, 15-80%, 15-90%, 15-95%, 20-30%, 20-40%, 20-50%, 20-60%, 20-70%, 20-80%, 20-90%, 20-95%, 20-100%, 30-40%, 30-50%, 30-60%, 30-70%, 30-80%, 30-90%, 30-95%, 30-100%, 40-50%, 40-60%, 40-70%, 40-80%, 40-90%, 40-95%, 40-100%, 50-60%, 50-70%, 50-80%, 50-90%, 50-95%, 50-100%, 60-70%, 60-80%, 60-90%, 60-95%, 60-100%, 70-80%, 70-90%, 70-95%, 70-100%, 80-90%, 80-95%, 80-100%, 90-95%, 90-100% or 95-100%. As a non-limiting example, the expression of protein and mRNA in the somatosensory cortex is reduced by 40-50%. As a non-limiting example, the expression of protein and mRNA in the somatosensory cortex is reduced by 30-70%. As a non-limiting example, the expression of protein and mRNA in the somatosensory cortex is reduced by 20-70%. As a non-limiting example, the expression of protein and mRNA in the somatosensory cortex is reduced by 15-70%. As a non-limiting example, the expression of protein and mRNA in the somatosensory cortex is reduced by at least 30%. As a non-limiting example, the expression of protein and mRNA in the somatosensory cortex is reduced by 40-70%. As a non-limiting example, the expression of protein and mRNA in the somatosensory cortex is reduced by 50-70%. As a non-limiting example, the expression of protein and mRNA in the somatosensory cortex is reduced by 50-60%. As a non-limiting example, the expression of protein and mRNA in the somatosensory cortex is reduced by 50%. As a non-limiting example, the expression of protein and mRNA in the somatosensory cortex is reduced by 51%. As a non-limiting example, the expression of protein and mRNA in the somatosensory cortex is reduced by 52%. As a non-limiting example, the expression of protein and mRNA in the somatosensory cortex is reduced by 53%. As a non-limiting example, the expression of protein and mRNA in the somatosensory cortex is reduced by 54%. As a non-limiting example, the expression of protein and mRNA in the somatosensory cortex is reduced by 55%. As a non-limiting example, the expression of protein and mRNA in the somatosensory cortex is reduced by 56%. As a non-limiting example, the expression of protein and mRNA in the somatosensory cortex is reduced by 57%. As a non-limiting example, the expression of protein and mRNA in the somatosensory cortex is reduced by 58%. As a non-limiting example, the expression of protein and mRNA in the somatosensory cortex is reduced by 59%. As a non-limiting example, the expression of protein and mRNA in the somatosensory cortex is reduced by 60%. As a non-limiting example, the expression of protein and mRNA in the somatosensory cortex is reduced by 61%. As a non-limiting example, the expression of protein and mRNA in the somatosensory cortex is reduced by 62%. As a non-limiting example, the expression of protein and mRNA in the somatosensory cortex is reduced by 63%. As a non-limiting example, the expression of protein and mRNA in the somatosensory cortex is reduced by 64%. As a non-limiting example, the expression of protein and mRNA in the somatosensory cortex is reduced by 65%. As a non-limiting example, the expression of protein and mRNA in the somatosensory cortex is reduced by 66%. As a non-limiting example, the expression of protein and mRNA in the somatosensory cortex is reduced by 67%. As a non-limiting example, the expression of protein and mRNA in the somatosensory cortex is reduced by 68%. As a non-limiting example, the expression of protein and mRNA in the somatosensory cortex is reduced by 69%. As a non-limiting example, the expression of protein and mRNA in the somatosensory cortex is reduced by 70%.

[0931] In one embodiment, the modulatory polynucleotides encoding siRNA duplexes or encoded dsRNA may be used to reduce the expression of protein and/or mRNA in the temporal cortex. The expression of protein and/or mRNA is reduced by at least about 15%, 16%, 17%, 18%, 19%, 20%, 21%, 22%, 23%, 24%, 25%, 26%, 27%, 28%, 29%, 30%, 31%, 32%, 33%, 34%, 35%, 36%, 37%, 38%, 39%, 40%, 41%, 42%, 43%, 44%, 45%, 46%, 47%, 48%, 49%, 50%, 51%, 52%, 53%, 54%, 55%, 56%, 57%, 58%, 59%, 60%, 61%, 62%, 63%, 64%, 65%, 66%, 67%, 68%, 69%, 70%, 71%, 72%, 73%, 74%, 75%, 76%, 77%, 78%, 79%, 80%, 85%, 90%, 95% and 100%, or at least 15-20%, 15-30%, 15-40%, 15-50%, 15-60%, 15-70%, 15-80%, 15-90%, 15-95%, 20-30%, 20-40%, 20-50%, 20-60%, 20-70%, 20-80%, 20-90%, 20-95%, 20-100%, 30-40%, 30-50%, 30-60%, 30-70%, 30-80%, 30-90%, 30-95%, 30-100%, 40-50%, 40-60%, 40-70%, 40-80%, 40-90%, 40-95%, 40-100%, 50-60%, 50-70%, 50-80%, 50-90%, 50-95%, 50-100%, 60-70%, 60-80%, 60-90%, 60-95%, 60-100%, 70-80%, 70-90%, 70-95%, 70-100%, 80-90%, 80-95%, 80-100%, 90-95%, 90-100% or 95-100%. As a non-limiting example, the expression of protein and mRNA in the temporal cortex is reduced by 40-50%. As a non-limiting example, the expression of protein and mRNA in the temporal cortex is reduced by 30-70%. As a non-limiting example, the expression of protein and mRNA in the temporal cortex is reduced by 20-70%. As a non-limiting example, the expression of protein and mRNA in the temporal cortex is reduced by 15-70%. As a non-limiting example, the expression of protein and mRNA in the temporal cortex is reduced by at least 30%. As a non-limiting example, the expression of protein and mRNA in the temporal cortex is reduced by 40-70%. As a non-limiting example, the expression of protein and mRNA in the temporal cortex is reduced by 50-70%. As a non-limiting example, the expression of protein and mRNA in the temporal cortex is reduced by 50-60%. As a non-limiting example, the expression of protein and mRNA in the temporal cortex is reduced by 50%. As a non-limiting example, the expression of protein and mRNA in the temporal cortex is reduced by 51%. As a non-limiting example, the expression of protein and mRNA in the temporal cortex is reduced by 52%. As a non-limiting example, the expression of protein and mRNA in the temporal cortex is reduced by 53%. As a non-limiting example, the expression of protein and mRNA in the temporal cortex is reduced by 54%. As a non-limiting example, the expression of protein and mRNA in the temporal cortex is reduced by 55%. As a non-limiting example, the expression of protein and mRNA in the temporal cortex is reduced by 56%. As a non-limiting example, the expression of protein and mRNA in the temporal cortex is reduced by 57%. As a non-limiting example, the expression of protein and mRNA in the temporal cortex is reduced by 58%. As a non-limiting example, the expression of protein and mRNA in the temporal cortex is reduced by 59%. As a non-limiting example, the expression of protein and mRNA in the temporal cortex is reduced by 60%. As a non-limiting example, the expression of protein and mRNA in the temporal cortex is reduced by 61%. As a non-limiting example, the expression of protein and mRNA in the temporal cortex is reduced by 62%. As a non-limiting example, the expression of protein and mRNA in the temporal cortex is reduced by 63%. As a non-limiting example, the expression of protein and mRNA in the temporal cortex is reduced by 64%. As a non-limiting example, the expression of protein and mRNA in the temporal cortex is reduced by 65%. As a non-limiting example, the expression of protein and mRNA in the temporal cortex is reduced by 66%. As a non-limiting example, the expression of protein and mRNA in the temporal cortex is reduced by 67%. As a non-limiting example, the expression of protein and mRNA in the temporal cortex is reduced by 68%. As a non-limiting example, the expression of protein and mRNA in the temporal cortex is reduced by 69%. As a non-limiting example, the expression of protein and mRNA in the temporal cortex is reduced by 70%.

[0932] In some embodiments, the present invention provides methods for treating, or ameliorating a disease and/or disorder of the central nervous system by inhibiting the expression of a gene and/or protein in a subject in need of treatment, the method comprising administering to the subject a pharmaceutically effective amount of at least one modulatory polynucleotides encoding siRNA duplex or a nucleic acid encoding an siRNA duplex targeting the gene, delivering the modulatory polynucleotides encoding siRNA duplex (or encoded duplex) into targeted cells, inhibiting gene expression and protein production, and ameliorating symptoms of the disease and/or disorder of the central nervous system in the subject.

### V. Kits and Devices

### Kits

[0933] The invention provides a variety of kits for conveniently and/or effectively carrying out methods of the present invention. Typically, kits will comprise sufficient amounts and/or numbers of components to allow a user to perform multiple treatments of a subject(s) and/or to perform multiple experiments.

[0934] Any of the vectors, constructs, modulatory polynucleotides, polynucleotides or polypeptides of the present invention may be comprised in a kit. In some embodiments, kits may further include reagents and/or instructions for creating and/or synthesizing compounds and/or compositions of the present invention. In some embodiments, kits may also include one or more buffers. In some embodiments, kits of the invention may include components for making protein or nucleic acid arrays or libraries and thus, may include, for example, solid supports.

[0935] In some embodiments, kit components may be packaged either in aqueous media or in lyophilized form. The container means of the kits will generally include at least one vial, test tube, flask, bottle, syringe or other container means, into which a component may be placed, and preferably, suitably aliquotted. Where there are more than one kit component, (labeling reagent and label may be packaged together), kits may also generally contain second, third or other additional containers into which additional components may be separately placed. In some embodiments, kits may also comprise second container means for containing sterile, pharmaceutically acceptable buffers and/or other diluents. In some embodiments, various combinations of components may be comprised in one or more vial. Kits of the present invention may also typically include means for containing compounds and/or compositions of the present invention, e.g., proteins, nucleic acids, and any other reagent containers in close confinement for commercial sale. Such containers may include injection or blow-molded plastic containers into which desired vials are retained.

[0936] In some embodiments, kit components are provided in one and/or more liquid solutions. In some embodiments, liquid solutions are aqueous solutions, with sterile aqueous solutions being particularly preferred. In some embodiments, kit components may be provided as dried powder(s). When reagents and/or components are provided as dry powders, such powders may be reconstituted by the addition of suitable volumes of solvent. In some embodiments, it is envisioned that solvents may also be provided in another container means. In some embodiments, labeling dyes are provided as dried powders. In some embodiments, it is contemplated that 10, 20, 30, 40, 50, 60, 70, 80, 90, 100, 120, 120, 130, 140, 150, 160, 170, 180, 190, 200, 300, 400, 500, 600, 700, 800, 900, 1000 micrograms or at least or at most those amounts of dried dye are provided in kits of the invention. In such embodiments, dye may then be resuspended in any suitable solvent, such as DMSO.

[0937] In some embodiments, kits may include instructions for employing kit components as well the use of any other reagent not included in the kit. Instructions may include variations that may be implemented.

### Devices

[0938] In some embodiments, compounds and/or compositions of the present invention may be combined with, coated onto or embedded in a device. Devices may include, but are not limited to, dental implants, stents, bone replacements, artificial joints, valves, pacemakers and/or other implantable therapeutic device.

[0939] The present invention provides for devices which may incorporate viral vectors that encode one or more modulatory polynucleotide payload molecules. These devices contain in a stable formulation the viral vectors which may be immediately delivered to a subject in need thereof, such as a human patient.

[0940] Devices for administration may be employed to deliver the viral vectors comprising a modulatory polynucleotide of the present invention according to single, multi- or split-dosing regimens taught herein.

[0941] Method and devices known in the art for multi-administration to cells, organs and tissues are contemplated for use in conjunction with the methods and compositions disclosed herein as embodiments of the present invention. These include, for example, those methods and devices having multiple needles, hybrid devices employing for example lumens or catheters as well as devices utilizing heat, electric current or radiation driven mechanisms.

[0942] The modulatory polynucleotides of the present invention may be used in the treatment, prophylaxis or amelioration of any disease or disorder characterized by aberrant or undesired target expression.

### VI. Definitions

[0943] At various places in the present specification, substituents of compounds of the present disclosure are disclosed in groups or in ranges. It is specifically intended that the present disclosure include each and every individual subcombination of the members of such groups and ranges.

[0944] About: As used herein, the term “about” means +/−10% of the recited value.

[0945] Administered in combination: As used herein, the term “administered in combination” or “combined administration” means that two or more agents are administered to a subject at the same time or within an interval such that there may be an overlap of an effect of each agent on the patient. In some embodiments, they are administered within about 60, 30, 15, 10, 5, or 1 minute of one another. In some embodiments, the administrations of the agents are spaced sufficiently closely together such that a combinatorial (e.g., a synergistic) effect is achieved.

[0946] Animal: As used herein, the term “animal” refers to any member of the animal kingdom. In some embodiments, “animal” refers to humans at any stage of development. In some embodiments, “animal” refers to non-human animals at any stage of development. In certain embodiments, the non-human animal is a mammal (e.g., a rodent, a mouse, a rat, a rabbit, a monkey, a dog, a cat, a sheep, cattle, a primate, or a pig). In some embodiments, animals include, but are not limited to, mammals, birds, reptiles, amphibians, fish, and worms. In some embodiments, the animal is a transgenic animal, genetically-engineered animal, or a clone.

[0947] Approximately: As used herein, the term “approximately” or “about,” as applied to one or more values of interest, refers to a value that is similar to a stated reference value. In certain embodiments, the term “approximately” or “about” refers to a range of values that fall within 25%, 20%, 19%, 18%, 17%, 16%, 15%, 14%, 13%, 12%, 11%, 10%, 9%, 8%, 7%, 6%, 5%, 4%, 3%, 2%, 1%, or less in either direction (greater than or less than) of the stated reference value unless otherwise stated or otherwise evident from the context (except where such number would exceed 100% of a possible value).

[0948] Associated with: As used herein, the terms “associated with,” “conjugated,” “linked,” “attached,” and “tethered,” when used with respect to two or more moieties, means that the moieties are physically associated or connected with one another, either directly or via one or more additional moieties that serves as a linking agent, to form a structure that is sufficiently stable so that the moieties remain physically associated under the conditions in which the structure is used, e.g., physiological conditions. An “association” need not be strictly through direct covalent chemical bonding. It may also suggest ionic or hydrogen bonding or a hybridization based connectivity sufficiently stable such that the “associated” entities remain physically associated.

[0949] Bifunctional: As used herein, the term “bifunctional” refers to any substance, molecule or moiety which is capable of or maintains at least two functions. The functions may affect the same outcome or a different outcome. The structure that produces the function may be the same or different.

[0950] Biocompatible: As used herein, the term “biocompatible” means compatible with living cells, tissues, organs or systems posing little to no risk of injury, toxicity or rejection by the immune system.

[0951] Biodegradable: As used herein, the term “biodegradable” means capable of being broken down into innocuous products by the action of living things.

[0952] Biologically active: As used herein, the phrase “biologically active” refers to a characteristic of any substance that has activity in a biological system and/or organism. For instance, a substance that, when administered to an organism, has a biological effect on that organism, is considered to be biologically active. In particular embodiments, a modulatory polynucleotide of the present invention may be considered biologically active if even a portion of the polynucleotides is biologically active or mimics an activity considered biologically relevant.

[0953] Induced pluripotent stem cells: As used herein, “induced pluripotent stem cells” are cells that may be induced to form any of several distinct cell types.

[0954] Compound: As used herein, the term “compound,” is meant to include all stereoisomers, geometric isomers, tautomers, and isotopes of the structures depicted.

[0955] The compounds described herein can be asymmetric (e.g., having one or more stereocenters). All stereoisomers, such as enantiomers and diastereomers, are intended unless otherwise indicated. Compounds of the present disclosure that contain asymmetrically substituted carbon atoms can be isolated in optically active or racemic forms. Methods on how to prepare optically active forms from optically active starting materials are known in the art, such as by resolution of racemic mixtures or by stereoselective synthesis. Many geometric isomers of olefins, C═N double bonds, and the like can also be present in the compounds described herein, and all such stable isomers are contemplated in the present disclosure. Cis and trans geometric isomers of the compounds of the present disclosure are described and may be isolated as a mixture of isomers or as separated isomeric forms.

[0956] Compounds of the present disclosure also include tautomeric forms. Tautomeric forms result from the swapping of a single bond with an adjacent double bond and the concomitant migration of a proton. Tautomeric forms include prototropic tautomers which are isomeric protonation states having the same empirical formula and total charge.

[0957] Compounds of the present disclosure also include all of the isotopes of the atoms occurring in the intermediate or final compounds. “Isotopes” refers to atoms having the same atomic number but different mass numbers resulting from a different number of neutrons in the nuclei. For example, isotopes of hydrogen include tritium and deuterium.

[0958] The compounds and salts of the present disclosure can be prepared in combination with solvent or water molecules to form solvates and hydrates by routine methods.

[0959] Conserved: As used herein, the term “conserved” refers to nucleotides or amino acid residues of a polynucleotide sequence or polypeptide sequence, respectively, that are those that occur unaltered in the same position of two or more sequences being compared. Nucleotides or amino acids that are relatively conserved are those that are conserved amongst more related sequences than nucleotides or amino acids appearing elsewhere in the sequences.

[0960] In some embodiments, two or more sequences are said to be “completely conserved” if they are 100% identical to one another. In some embodiments, two or more sequences are said to be “highly conserved” if they are at least 70% identical, at least 80% identical, at least 90% identical, or at least 95% identical to one another. In some embodiments, two or more sequences are said to be “highly conserved” if they are about 70% identical, about 80% identical, about 90% identical, about 95%, about 98%, or about 99% identical to one another. In some embodiments, two or more sequences are said to be “conserved” if they are at least 30% identical, at least 40% identical, at least 50% identical, at least 60% identical, at least 70% identical, at least 80% identical, at least 90% identical, or at least 95% identical to one another. In some embodiments, two or more sequences are said to be “conserved” if they are about 30% identical, about 40% identical, about 50% identical, about 60% identical, about 70% identical, about 80% identical, about 90% identical, about 95% identical, about 98% identical, or about 99% identical to one another. Conservation of sequence may apply to the entire length of a polynucleotide or polypeptide or may apply to a portion, region or feature thereof.

[0961] Controlled Release: As used herein, the term “controlled release” refers to a pharmaceutical composition or compound release profile that conforms to a particular pattern of release to effect a therapeutic outcome.

[0962] Cyclic or Cyclized: As used herein, the term “cyclic” refers to the presence of a continuous loop. Cyclic molecules need not be circular, only joined to form an unbroken chain of subunits.

[0963] Cytostatic: As used herein, “cytostatic” refers to inhibiting, reducing, suppressing the growth, division, or multiplication of a cell (e.g., a mammalian cell (e.g., a human cell)), bacterium, virus, fungus, protozoan, parasite, prion, or a combination thereof.

[0964] Cytotoxic: As used herein, “cytotoxic” refers to killing or causing injurious, toxic, or deadly effect on a cell (e.g., a mammalian cell (e.g., a human cell)), bacterium, virus, fungus, protozoan, parasite, prion, or a combination thereof.

[0965] Delivery: As used herein, “delivery” refers to the act or manner of delivering a compound, substance, entity, moiety, cargo or payload.

[0966] Delivery Agent: As used herein, “delivery agent” refers to any substance which facilitates, at least in part, the in vivo delivery of a modulatory polynucleotide to targeted cells.

[0967] Destabilized: As used herein, the term “destable,” “destabilize,” or “destabilizing region” means a region or molecule that is less stable than a starting, wild-type or native form of the same region or molecule.

[0968] Detectable label: As used herein, “detectable label” refers to one or more markers, signals, or moieties which are attached, incorporated or associated with another entity that is readily detected by methods known in the art including radiography, fluorescence, chemiluminescence, enzymatic activity, absorbance and the like. Detectable labels include radioisotopes, fluorophores, chromophores, enzymes, dyes, metal ions, ligands such as biotin, avidin, streptavidin and haptens, quantum dots, and the like. Detectable labels may be located at any position in the peptides or proteins disclosed herein. They may be within the amino acids, the peptides, or proteins, or located at the N- or C- termini.

[0969] Diastereomer: As used herein, the term “diastereomer,” means stereoisomers that are not mirror images of one another and are non-superimposable on one another.

[0970] Digest: As used herein, the term “digest” means to break apart into smaller pieces or components. When referring to polypeptides or proteins, digestion results in the production of peptides.

[0971] Distal: As used herein, the term “distal” means situated away from the center or away from a point or region of interest.

[0972] Dosing regimen: As used herein, a “dosing regimen” is a schedule of administration or physician determined regimen of treatment, prophylaxis, or palliative care.

[0973] Enantiomer: As used herein, the term “enantiomer” means each individual optically active form of a compound of the invention, having an optical purity or enantiomeric excess (as determined by methods standard in the art) of at least 80% (i.e., at least 90% of one enantiomer and at most 10% of the other enantiomer), preferably at least 90% and more preferably at least 98%.

[0974] Encapsulate: As used herein, the term “encapsulate” means to enclose, surround or encase.

[0975] Engineered: As used herein, embodiments of the invention are “engineered” when they are designed to have a feature or property, whether structural or chemical, that varies from a starting point, wild type or native molecule.

[0976] Effective Amount: As used herein, the term “effective amount” of an agentis that amount sufficient to effect beneficial or desired results, for example, clinical results, and, as such, an “effective amount” depends upon the context in which it is being applied. For example, in the context of administering an agent that treats cancer, an effective amount of an agent is, for example, an amount sufficient to achieve treatment, as defined herein, of cancer, as compared to the response obtained without administration of the agent.

[0977] Exosome: As used herein, “exosome” is a vesicle secreted by mammalian cells or a complex involved in RNA degradation.

[0978] Expression: As used herein, “expression” of a nucleic acid sequence refers to one or more of the following events: (1) production of an RNA template from a DNA sequence (e.g., by transcription); (2) processing of an RNA transcript (e.g., by splicing, editing, 5′ cap formation, and/or 3′ end processing); (3) translation of an RNA into a polypeptide or protein; and (4) post-translational modification of a polypeptide or protein.

[0979] Feature: As used herein, a “feature” refers to a characteristic, a property, or a distinctive element.

[0980] Formulation: As used herein, a “formulation” includes at least one modulatory polynucleotide and a delivery agent.

[0981] Fragment: A “fragment,” as used herein, refers to a portion. For example, fragments of proteins may comprise polypeptides obtained by digesting full-length protein isolated from cultured cells.

[0982] Functional: As used herein, a “functional” biological molecule is a biological molecule in a form in which it exhibits a property and/or activity by which it is characterized.

[0983] Homology: As used herein, the term “homology” refers to the overall relatedness between polymeric molecules, e.g. between nucleic acid molecules (e.g. DNA molecules and/or RNA molecules) and/or between polypeptide molecules. In some embodiments, polymeric molecules are considered to be “homologous” to one another if their sequences are at least 25%, 30%, 35%, 40%, 45%, 50%, 55%, 60%, 65%, 70%, 75%, 80%, 85%, 90%, 95%, or 99% identical or similar. The term “homologous” necessarily refers to a comparison between at least two sequences (polynucleotide or polypeptide sequences). In accordance with the invention, two polynucleotide sequences are considered to be homologous if the polypeptides they encode are at least about 50%, 60%, 70%, 80%, 90%, 95%, or even 99% for at least one stretch of at least about 20 amino acids. In some embodiments, homologous polynucleotide sequences are characterized by the ability to encode a stretch of at least 4-5 uniquely specified amino acids. For polynucleotide sequences less than 60 nucleotides in length, homology is determined by the ability to encode a stretch of at least 4-5 uniquely specified amino acids. In accordance with the invention, two protein sequences are considered to be homologous if the proteins are at least about 50%, 60%, 70%, 80%, or 90% identical for at least one stretch of at least about 20 amino acids.

[0984] Identity: As used herein, the term “identity” refers to the overall relatedness between polymeric molecules, e.g., between polynucleotide molecules (e.g. DNA molecules and/or RNA molecules) and/or between polypeptide molecules. Calculation of the percent identity of two polynucleotide sequences, for example, can be performed by aligning the two sequences for optimal comparison purposes (e.g., gaps can be introduced in one or both of a first and a second nucleic acid sequences for optimal alignment and non-identical sequences can be disregarded for comparison purposes). In certain embodiments, the length of a sequence aligned for comparison purposes is at least 30%, at least 40%, at least 50%, at least 60%, at least 70%, at least 80%, at least 90%, at least 95%, or 100% of the length of the reference sequence. The nucleotides at corresponding nucleotide positions are then compared. When a position in the first sequence is occupied by the same nucleotide as the corresponding position in the second sequence, then the molecules are identical at that position. The percent identity between the two sequences is a function of the number of identical positions shared by the sequences, taking into account the number of gaps, and the length of each gap, which needs to be introduced for optimal alignment of the two sequences. The comparison of sequences and determination of percent identity between two sequences can be accomplished using a mathematical algorithm. For example, the percent identity between two nucleotide sequences can be determined using methods such as those described in Computational Molecular Biology, Lesk, A. M., ed., Oxford University Press, New York, 1988; Biocomputing: Informatics and Genome Projects, Smith, D. W., ed., Academic Press, New York, 1993; Sequence Analysis in Molecular Biology, von Heinje, G., Academic Press, 1987; Computer Analysis of Sequence Data, Part I, Griffin, A. M., and Griffin, H. G., eds., Humana Press, New Jersey, 1994; and Sequence Analysis Primer, Gribskov, M. and Devereux, J., eds., M Stockton Press, New York, 1991; each of which is incorporated herein by reference. For example, the percent identity between two nucleotide sequences can be determined using the algorithm of Meyers and Miller (CABIOS, 1989, 4:11-17), which has been incorporated into the ALIGN program (version 2.0) using a PAM120 weight residue table, a gap length penalty of 12 and a gap penalty of 4. The percent identity between two nucleotide sequences can, alternatively, be determined using the GAP program in the GCG software package using an NWSgapdna.CMP matrix. Methods commonly employed to determine percent identity between sequences include, but are not limited to those disclosed in Carillo, H., and Lipman, D., SIAM J Applied Math., 48:1073 (1988); incorporated herein by reference. Techniques for determining identity are codified in publicly available computer programs. Exemplary computer software to determine homology between two sequences include, but are not limited to, GCG program package, Devereux, J., et al., Nucleic Acids Research, 12(1), 387 (1984)), BLASTP, BLASTN, and FASTA Altschul, S. F. et al., J. Molec. Biol., 215, 403 (1990)).

[0985] Inhibit expression of a gene: As used herein, the phrase “inhibit expression of a gene” means to cause a reduction in the amount of an expression product of the gene. The expression product can be an RNA transcribed from the gene (e.g., an mRNA) or a polypeptide translated from an mRNA transcribed from the gene. Typically a reduction in the level of an mRNA results in a reduction in the level of a polypeptide translated therefrom. The level of expression may be determined using standard techniques for measuring mRNA or protein.

[0986] Isomer: As used herein, the term “isomer” means any tautomer, stereoisomer, enantiomer, or diastereomer of any compound of the invention. It is recognized that the compounds of the invention can have one or more chiral centers and/or double bonds and, therefore, exist as stereoisomers, such as double-bond isomers (i.e., geometric E/Z isomers) or diastereomers (e.g., enantiomers (i.e., (+) or (−)) or cis/trans isomers). According to the invention, the chemical structures depicted herein, and therefore the compounds of the invention, encompass all of the corresponding stereoisomers, that is, both the stereomerically pure form (e.g., geometrically pure, enantiomerically pure, or diastereomerically pure) and enantiomeric and stereoisomeric mixtures, e.g., racemates. Enantiomeric and stereoisomeric mixtures of compounds of the invention can typically be resolved into their component enantiomers or stereoisomers by well-known methods, such as chiral-phase gas chromatography, chiral-phase high performance liquid chromatography, crystallizing the compound as a chiral salt complex, or crystallizing the compound in a chiral solvent. Enantiomers and stereoisomers can also be obtained from stereomerically or enantiomerically pure intermediates, reagents, and catalysts by well-known asymmetric synthetic methods.

[0987] In vitro: As used herein, the term “in vitro” refers to events that occur in an artificial environment, e.g., in a test tube or reaction vessel, in cell culture, in a Petri dish, etc., rather than within an organism (e.g., animal, plant, or microbe).

[0988] In vivo: As used herein, the term “in vivo” refers to events that occur within an organism (e.g., animal, plant, or microbe or cell or tissue thereof).

[0989] Isolated: As used herein, the term “isolated” refers to a substance or entity that has been separated from at least some of the components with which it was associated (whether in nature or in an experimental setting). Isolated substances may have varying levels of purity in reference to the substances from which they have been associated. Isolated substances and/or entities may be separated from at least about 10%, about 20%, about 30%, about 40%, about 50%, about 60%, about 70%, about 80%, about 90%, or more of the other components with which they were initially associated. In some embodiments, isolated agents are more than about 80%, about 85%, about 90%, about 91%, about 92%, about 93%, about 94%, about 95%, about 96%, about 97%, about 98%, about 99%, or more than about 99% pure. As used herein, a substance is “pure” if it is substantially free of other components.

[0990] Substantially isolated: By “substantially isolated” is meant that the compound is substantially separated from the environment in which it was formed or detected. Partial separation can include, for example, a composition enriched in the compound of the present disclosure. Substantial separation can include compositions containing at least about 50%, at least about 60%, at least about 70%, at least about 80%, at least about 90%, at least about 95%, at least about 97%, or at least about 99% by weight of the compound of the present disclosure, or salt thereof. Methods for isolating compounds and their salts are routine in the art.

[0991] Linker: As used herein, a linker refers to a group of atoms, e.g., 10-1,000 atoms, and can be comprised of the atoms or groups such as, but not limited to, carbon, amino, alkylamino, oxygen, sulfur, sulfoxide, sulfonyl, carbonyl, and imine. The linker can be attached to a modified nucleoside or nucleotide on the nucleobase or sugar moiety at a first end, and to a payload, e.g., a detectable or therapeutic agent, at a second end. The linker may be of sufficient length as to not interfere with incorporation into a nucleic acid sequence. The linker can be used for any useful purpose, such as to form modulatory polynucleotide multimers (e.g., through linkage of two or more modulatory polynucleotides molecules) or modulatory polynucleotides conjugates, as well as to administer a payload, as described herein. Examples of chemical groups that can be incorporated into the linker include, but are not limited to, alkyl, alkenyl, alkynyl, amido, amino, ether, thioether, ester, alkylene, heteroalkylene, aryl, or heterocyclyl, each of which can be optionally substituted, as described herein. Examples of linkers include, but are not limited to, unsaturated alkanes, polyethylene glycols (e.g., ethylene or propylene glycol monomeric units, e.g., diethylene glycol, dipropylene glycol, triethylene glycol, tripropylene glycol, tetraethylene glycol, or tetraethylene glycol), and dextran polymers and derivatives thereof. Other examples include, but are not limited to, cleavable moieties within the linker, such as, for example, a disulfide bond (—S—S—) or an azo bond (—N═N—), which can be cleaved using a reducing agent or photolysis. Non-limiting examples of a selectively cleavable bond include an amido bond can be cleaved for example by the use of tris(2-carboxyethyl)phosphine (TCEP), or other reducing agents, and/or photolysis, as well as an ester bond can be cleaved for example by acidic or basic hydrolysis.

[0992] MicroRNA (miRNA) binding site: As used herein, a microRNA (miRNA) binding site represents a nucleotide location or region of a nucleic acid transcript to which at least the “seed” region of a miRNA binds.

[0993] Modified: As used herein “modified” refers to a changed state or structure of a molecule of the invention. Molecules may be modified in many ways including chemically, structurally, and functionally.

[0994] Naturally occurring: As used herein, “naturally occurring” means existing in nature without artificial aid.

[0995] Neutralizing antibody: As used herein, a “neutralizing antibody” refers to an antibody which binds to its antigen and defends a cell from an antigen or infectious agent by neutralizing or abolishing any biological activity it has.

[0996] Non-human vertebrate: As used herein, a “non human vertebrate” includes all vertebrates except Homo sapiens, including wild and domesticated species. Examples of non-human vertebrates include, but are not limited to, mammals, such as alpaca, banteng, bison, camel, cat, cattle, deer, dog, donkey, gayal, goat, guinea pig, horse, llama, mule, pig, rabbit, reindeer, sheep water buffalo, and yak.

[0997] Off-target: As used herein, “off target” refers to any unintended effect on any one or more target, gene, or cellular transcript.

[0998] Open reading frame: As used herein, “open reading frame” or “ORF” refers to a sequence which does not contain a stop codon in a given reading frame.

[0999] Operably linked: As used herein, the phrase “operably linked” refers to a functional connection between two or more molecules, constructs, transcripts, entities, moieties or the like.

[1000] Optionally substituted: Herein a phrase of the form “optionally substituted X” (e.g., optionally substituted alkyl) is intended to be equivalent to “X, wherein X is optionally substituted” (e.g., “alkyl, wherein the alkyl is optionally substituted”). It is not intended to mean that the feature “X” (e.g. alkyl) per se is optional.

[1001] Peptide: As used herein, “peptide” is less than or equal to 50 amino acids long, e.g., about 5, 10, 15, 20, 25, 30, 35, 40, 45, or 50 amino acids long.

[1002] Patient: As used herein, “patient” refers to a subject who may seek or be in need of treatment, requires treatment, is receiving treatment, will receive treatment, or a subject who is under care by a trained professional for a particular disease or condition.

[1003] Pharmaceutically acceptable: The phrase “pharmaceutically acceptable” is employed herein to refer to those compounds, materials, compositions, and/or dosage forms which are, within the scope of sound medical judgment, suitable for use in contact with the tissues of human beings and animals without excessive toxicity, irritation, allergic response, or other problem or complication, commensurate with a reasonable benefit/risk ratio.

[1004] Pharmaceutically acceptable excipients: The phrase “pharmaceutically acceptable excipient,” as used herein, refers any ingredient other than the compounds described herein (for example, a vehicle capable of suspending or dissolving the active compound) and having the properties of being substantially nontoxic and non-inflammatory in a patient. Excipients may include, for example: antiadherents, antioxidants, binders, coatings, compression aids, disintegrates, dyes (colors), emollients, emulsifiers, fillers (diluents), film formers or coatings, flavors, fragrances, glidants (flow enhancers), lubricants, preservatives, printing inks, sorbents, suspensing or dispersing agents, sweeteners, and waters of hydration. Exemplary excipients include, but are not limited to: butylated hydroxytoluene (BHT), calcium carbonate, calcium phosphate (dibasic), calcium stearate, croscarmellose, crosslinked polyvinyl pyrrolidone, citric acid, crospovidone, cysteine, ethylcellulose, gelatin, hydroxypropyl cellulose, hydroxypropyl methylcellulose, lactose, magnesium stearate, maltitol, mannitol, methionine, methylcellulose, methyl paraben, microcrystalline cellulose, polyethylene glycol, polyvinyl pyrrolidone, povidone, pregelatinized starch, propyl paraben, retinyl palmitate, shellac, silicon dioxide, sodium carboxymethyl cellulose, sodium citrate, sodium starch glycolate, sorbitol, starch (corn), stearic acid, sucrose, talc, titanium dioxide, vitamin A, vitamin E, vitamin C, and xylitol.

[1005] Pharmaceutically acceptable salts: The present disclosure also includes pharmaceutically acceptable salts of the compounds described herein. As used herein, “pharmaceutically acceptable salts” refers to derivatives of the disclosed compounds wherein the parent compound is modified by converting an existing acid or base moiety to its salt form (e.g., by reacting the free base group with a suitable organic acid). Examples of pharmaceutically acceptable salts include, but are not limited to, mineral or organic acid salts of basic residues such as amines; alkali or organic salts of acidic residues such as carboxylic acids; and the like. Representative acid addition salts include acetate, acetic acid, adipate, alginate, ascorbate, aspartate, benzenesulfonate, benzene sulfonic acid, benzoate, bisulfate, borate, butyrate, camphorate, camphorsulfonate, citrate, cyclopentanepropionate, digluconate, dodecylsulfate, ethanesulfonate, fumarate, glucoheptonate, glycerophosphate, hemisulfate, heptonate, hexanoate, hydrobromide, hydrochloride, hydroiodide, 2-hydroxy-ethanesulfonate, lactobionate, lactate, laurate, lauryl sulfate, malate, maleate, malonate, methanesulfonate, 2-naphthalenesulfonate, nicotinate, nitrate, oleate, oxalate, palmitate, pamoate, pectinate, persulfate, 3-phenylpropionate, phosphate, picrate, pivalate, propionate, stearate, succinate, sulfate, tartrate, thiocyanate, toluenesulfonate, undecanoate, valerate salts, and the like. Representative alkali or alkaline earth metal salts include sodium, lithium, potassium, calcium, magnesium, and the like, as well as nontoxic ammonium, quaternary ammonium, and amine cations, including, but not limited to ammonium, tetramethylammonium, tetraethylammonium, methylamine, dimethylamine, trimethylamine, triethylamine, ethylamine, and the like. The pharmaceutically acceptable salts of the present disclosure include the conventional non-toxic salts of the parent compound formed, for example, from non-toxic inorganic or organic acids. The pharmaceutically acceptable salts of the present disclosure can be synthesized from the parent compound which contains a basic or acidic moiety by conventional chemical methods. Generally, such salts can be prepared by reacting the free acid or base forms of these compounds with a stoichiometric amount of the appropriate base or acid in water or in an organic solvent, or in a mixture of the two; generally, nonaqueous media like ether, ethyl acetate, ethanol, isopropanol, or acetonitrile are preferred. Lists of suitable salts are found in Remington's Pharmaceutical Sciences, 17^{th} ed., Mack Publishing Company, Easton, Pa., 1985, p. 1418, Pharmaceutical Salts: Properties, Selection, and Use, P. H. Stahl and C. G. Wermuth (eds.), Wiley-VCH, 2008, and Berge et al., Journal of Pharmaceutical Science, 66, 1-19 (1977), each of which is incorporated herein by reference in its entirety.

[1006] Pharmaceutically acceptable solvate: The term “pharmaceutically acceptable solvate,” as used herein, means a compound of the invention wherein molecules of a suitable solvent are incorporated in the crystal lattice. A suitable solvent is physiologically tolerable at the dosage administered. For example, solvates may be prepared by crystallization, recrystallization, or precipitation from a solution that includes organic solvents, water, or a mixture thereof. Examples of suitable solvents are ethanol, water (for example, mono-, di-, and tri-hydrates), N-methylpyrrolidinone (NMP), dimethyl sulfoxide (DMSO), N,N′-dimethylformamide (DMF), N,N′-dimethylacetamide (DMAC), 1,3-dimethyl-2-imidazolidinone (DMEU), 1,3-dimethyl-3,4,5,6-tetrahydro-2-(1H)-pyrimidinone (DMPU), acetonitrile (ACN), propylene glycol, ethyl acetate, benzyl alcohol, 2-pyrrolidone, benzyl benzoate, and the like. When water is the solvent, the solvate is referred to as a “hydrate.”

[1007] Pharmacokinetic: As used herein, “pharmacokinetic” refers to any one or more properties of a molecule or compound as it relates to the determination of the fate of substances administered to a living organism. Pharmacokinetics is divided into several areas including the extent and rate of absorption, distribution, metabolism and excretion. This is commonly referred to as ADME where: (A) Absorption is the process of a substance entering the blood circulation; (D) Distribution is the dispersion or dissemination of substances throughout the fluids and tissues of the body; (M) Metabolism (or Biotransformation) is the irreversible transformation of parent compounds into daughter metabolites; and (E) Excretion (or Elimination) refers to the elimination of the substances from the body. In rare cases, some drugs irreversibly accumulate in body tissue.

[1008] Physicochemical: As used herein, “physicochemical” means of or relating to a physical and/or chemical property.

[1009] Preventing: As used herein, the term “preventing” refers to partially or completely delaying onset of an infection, disease, disorder and/or condition; partially or completely delaying onset of one or more symptoms, features, or clinical manifestations of a particular infection, disease, disorder, and/or condition; partially or completely delaying onset of one or more symptoms, features, or manifestations of a particular infection, disease, disorder, and/or condition; partially or completely delaying progression from an infection, a particular disease, disorder and/or condition; and/or decreasing the risk of developing pathology associated with the infection, the disease, disorder, and/or condition.

[1010] Prodrug: The present disclosure also includes prodrugs of the compounds described herein. As used herein, “prodrugs” refer to any substance, molecule or entity which is in a form predicate for that substance, molecule or entity to act as a therapeutic upon chemical or physical alteration. Prodrugs may by covalently bonded or sequestered in some way and which release or are converted into the active drug moiety prior to, upon or after administered to a mammalian subject. Prodrugs can be prepared by modifying functional groups present in the compounds in such a way that the modifications are cleaved, either in routine manipulation or in vivo, to the parent compounds. Prodrugs include compounds wherein hydroxyl, amino, sulfhydryl, or carboxyl groups are bonded to any group that, when administered to a mammalian subject, cleaves to form a free hydroxyl, amino, sulfhydryl, or carboxyl group respectively. Preparation and use of prodrugs is discussed in T. Higuchi and V. Stella, “Pro-drugs as Novel Delivery Systems,” Vol. 14 of the A.C.S. Symposium Series, and in Bioreversible Carriers in Drug Design, ed. Edward B. Roche, American Pharmaceutical Association and Pergamon Press, 1987, both of which are hereby incorporated by reference in their entirety. In some embodiments, the pri-miRs of the invention may be prodrugs of the pre-miRs. Likewise either pri- or pre-miRs may be prodrugs of the artificial miRs which are processed from them.

[1011] Proliferate: As used herein, the term “proliferate” means to grow, expand or increase or cause to grow, expand or increase rapidly. “Proliferative” means having the ability to proliferate. “Anti-proliferative” means having properties counter to or inapposite to proliferative properties.

[1012] Prophylactic: As used herein, “prophylactic” refers to a therapeutic or course of action used to prevent the spread of disease.

[1013] Prophylaxis: As used herein, a “prophylaxis” refers to a measure taken to maintain health and prevent the spread of disease.

[1014] Protein cleavage site: As used herein, “protein cleavage site” refers to a site where controlled cleavage of the amino acid chain can be accomplished by chemical, enzymatic or photochemical means.

[1015] Protein cleavage signal: As used herein “protein cleavage signal” refers to at least one amino acid that flags or marks a polypeptide for cleavage.

[1016] Protein of interest: As used herein, the terms “proteins of interest” or “desired proteins” include those provided herein and fragments, mutants, variants, and alterations thereof.

[1017] Proximal: As used herein, the term “proximal” means situated nearer to the center or to a point or region of interest.

[1018] Purified: As used herein, “purify,” “purified,” “purification” means to make substantially pure or clear from unwanted components, material defilement, admixture or imperfection.

[1019] Sample: As used herein, the term “sample” or “biological sample” refers to a subset of its tissues, cells or component parts (e.g. body fluids, including but not limited to blood, mucus, lymphatic fluid, synovial fluid, cerebrospinal fluid, saliva, amniotic fluid, amniotic cord blood, urine, vaginal fluid and semen). A sample further may include a homogenate, lysate or extract prepared from a whole organism or a subset of its tissues, cells or component parts, or a fraction or portion thereof, including but not limited to, for example, plasma, serum, spinal fluid, lymph fluid, the external sections of the skin, respiratory, intestinal, and genitourinary tracts, tears, saliva, milk, blood cells, tumors, organs. A sample further refers to a medium, such as a nutrient broth or gel, which may contain cellular components, such as proteins or nucleic acid molecule.

[1020] Signal Sequences: As used herein, the phrase “signal sequences” refers to a sequence which can direct the transport or localization of a protein.

[1021] Single unit dose: As used herein, a “single unit dose” is a dose of any therapeutic administered in one dose/at one time/single route/single point of contact, i.e., single administration event.

[1022] Similarity: As used herein, the term “similarity” refers to the overall relatedness between polymeric molecules, e.g. between polynucleotide molecules (e.g. DNA molecules and/or RNA molecules) and/or between polypeptide molecules. Calculation of percent similarity of polymeric molecules to one another can be performed in the same manner as a calculation of percent identity, except that calculation of percent similarity takes into account conservative substitutions as is understood in the art.

[1023] Split dose: As used herein, a “split dose” is the division of single unit dose or total daily dose into two or more doses.

[1024] Stable: As used herein “stable” refers to a compound that is sufficiently robust to survive isolation to a useful degree of purity from a reaction mixture, and preferably capable of formulation into an efficacious therapeutic agent.

[1025] Stabilized: As used herein, the term “stabilize”, “stabilized,” “stabilized region” means to make or become stable.

[1026] Stereoisomer: As used herein, the term “stereoisomer” refers to all possible different isomeric as well as conformational forms which a compound may possess (e.g., a compound of any formula described herein), in particular all possible stereochemically and conformationally isomeric forms, all diastereomers, enantiomers and/or conformers of the basic molecular structure. Some compounds of the present invention may exist in different tautomeric forms, all of the latter being included within the scope of the present invention.

[1027] Subject: As used herein, the term “subject” or “patient” refers to any organism to which a composition in accordance with the invention may be administered, e.g., for experimental, diagnostic, prophylactic, and/or therapeutic purposes. Typical subjects include animals (e.g., mammals such as mice, rats, rabbits, non-human primates, and humans) and/or plants.

[1028] Substantially: As used herein, the term “substantially” refers to the qualitative condition of exhibiting total or near-total extent or degree of a characteristic or property of interest. One of ordinary skill in the biological arts will understand that biological and chemical phenomena rarely, if ever, go to completion and/or proceed to completeness or achieve or avoid an absolute result. The term “substantially” is therefore used herein to capture the potential lack of completeness inherent in many biological and chemical phenomena.

[1029] Substantially equal: As used herein as it relates to time differences between doses, the term means plus/minus 2%.

[1030] Substantially simultaneously: As used herein and as it relates to plurality of doses, the term means within 2 seconds.

[1031] Suffering from: An individual who is “suffering from” a disease, disorder, and/or condition has been diagnosed with or displays one or more symptoms of a disease, disorder, and/or condition.

[1032] Susceptible to: An individual who is “susceptible to” a disease, disorder, and/or condition has not been diagnosed with and/or may not exhibit symptoms of the disease, disorder, and/or condition but harbors a propensity to develop a disease or its symptoms. In some embodiments, an individual who is susceptible to a disease, disorder, and/or condition (for example, cancer) may be characterized by one or more of the following: (1) a genetic mutation associated with development of the disease, disorder, and/or condition; (2) a genetic polymorphism associated with development of the disease, disorder, and/or condition; (3) increased and/or decreased expression and/or activity of a protein and/or nucleic acid associated with the disease, disorder, and/or condition; (4) habits and/or lifestyles associated with development of the disease, disorder, and/or condition; (5) a family history of the disease, disorder, and/or condition; and (6) exposure to and/or infection with a microbe associated with development of the disease, disorder, and/or condition. In some embodiments, an individual who is susceptible to a disease, disorder, and/or condition will develop the disease, disorder, and/or condition. In some embodiments, an individual who is susceptible to a disease, disorder, and/or condition will not develop the disease, disorder, and/or condition.

[1033] Sustained release: As used herein, the term “sustained release” refers to a pharmaceutical composition or compound release profile that conforms to a release rate over a specific period of time.

[1034] Synthetic: The term “synthetic” means produced, prepared, and/or manufactured by the hand of man. Synthesis of polynucleotides or polypeptides or other molecules of the present invention may be chemical or enzymatic.

[1035] Targeted Cells: As used herein, “targeted cells” refers to any one or more cells of interest. The cells may be found in vitro, in vivo, in situ or in the tissue or organ of an organism. The organism may be an animal, preferably a mammal, more preferably a human and most preferably a patient.

[1036] Therapeutic Agent: The term “therapeutic agent” refers to any agent that, when administered to a subject, has a therapeutic, diagnostic, and/or prophylactic effect and/or elicits a desired biological and/or pharmacological effect.

[1037] Therapeutically effective amount: As used herein, the term “therapeutically effective amount” means an amount of an agent to be delivered (e.g., nucleic acid, drug, therapeutic agent, diagnostic agent, prophylactic agent, etc.) that is sufficient, when administered to a subject suffering from or susceptible to an infection, disease, disorder, and/or condition, to treat, improve symptoms of, diagnose, prevent, and/or delay the onset of the infection, disease, disorder, and/or condition.

[1038] Therapeutically effective outcome: As used herein, the term “therapeutically effective outcome” means an outcome that is sufficient in a subject suffering from or susceptible to an infection, disease, disorder, and/or condition, to treat, improve symptoms of, diagnose, prevent, and/or delay the onset of the infection, disease, disorder, and/or condition.

[1039] Total daily dose: As used herein, a “total daily dose” is an amount given or prescribed in 24 hour period. It may be administered as a single unit dose.

[1040] Transfection: As used herein, the term “transfection” refers to methods to introduce exogenous nucleic acids into a cell. Methods of transfection include, but are not limited to, chemical methods, physical treatments and cationic lipids or mixtures.

[1041] Treating: As used herein, the term “treating” refers to partially or completely alleviating, ameliorating, improving, relieving, delaying onset of, inhibiting progression of, reducing severity of, and/or reducing incidence of one or more symptoms or features of a particular infection, disease, disorder, and/or condition. For example, “treating” cancer may refer to inhibiting survival, growth, and/or spread of a tumor. Treatment may be administered to a subject who does not exhibit signs of a disease, disorder, and/or condition and/or to a subject who exhibits only early signs of a disease, disorder, and/or condition for the purpose of decreasing the risk of developing pathology associated with the disease, disorder, and/or condition.

[1042] Unmodified: As used herein, “unmodified” refers to any substance, compound or molecule prior to being changed in any way. Unmodified may, but does not always, refer to the wild type or native form of a biomolecule. Molecules may undergo a series of modifications whereby each modified molecule may serve as the “unmodified” starting molecule for a subsequent modification.

### VII. Equivalents and Scope

[1043] Those skilled in the art will recognize, or be able to ascertain using no more than routine experimentation, many equivalents to the specific embodiments in accordance with the invention described herein. The scope of the present invention is not intended to be limited to the above Description, but rather is as set forth in the appended claims.

[1044] In the claims, articles such as “a,” “an,” and “the” may mean one or more than one unless indicated to the contrary or otherwise evident from the context. Claims or descriptions that include “or” between one or more members of a group are considered satisfied if one, more than one, or all of the group members are present in, employed in, or otherwise relevant to a given product or process unless indicated to the contrary or otherwise evident from the context. The invention includes embodiments in which exactly one member of the group is present in, employed in, or otherwise relevant to a given product or process. The invention includes embodiments in which more than one, or all of the group members are present in, employed in, or otherwise relevant to a given product or process.

[1045] It is also noted that the term “comprising” is intended to be open and permits but does not require the inclusion of additional elements or steps. When the term “comprising” is used herein, the term “consisting of” is thus also encompassed and disclosed.

[1046] Unless otherwise defined, all technical and scientific terms used herein have the same meaning as commonly understood by one of ordinary skill in the art to which this invention belongs. Methods and materials are described herein for use in the present disclosure; other, suitable methods and materials known in the art can also be used.

[1047] Where ranges are given, endpoints are included. Furthermore, it is to be understood that unless otherwise indicated or otherwise evident from the context and understanding of one of ordinary skill in the art, values that are expressed as ranges can assume any specific value or subrange within the stated ranges in different embodiments of the invention, to the tenth of the unit of the lower limit of the range, unless the context clearly dictates otherwise.

[1048] In addition, it is to be understood that any particular embodiment of the present invention that falls within the prior art may be explicitly excluded from any one or more of the claims. Since such embodiments are deemed to be known to one of ordinary skill in the art, they may be excluded even if the exclusion is not set forth explicitly herein. Any particular embodiment of the compositions of the invention (e.g., any nucleic acid or protein encoded thereby; any method of production; any method of use; etc.) can be excluded from any one or more claims, for any reason, whether or not related to the existence of prior art.

[1049] All cited sources, for example, references, publications, databases, database entries, and art cited herein, are incorporated into this application by reference, even if not expressly stated in the citation. In case of conflicting statements of a cited source and the instant application, the statement in the instant application shall control.

[1050] Section and table headings are not intended to be limiting.

[1051] While the present invention has been described at some length and with some particularity with respect to the several described embodiments, it is not intended that it should be limited to any such particulars or embodiments or any particular embodiment, but it is to be construed with references to the appended claims so as to provide the broadest possible interpretation of such claims in view of the prior art and, therefore, to effectively encompass the intended scope of the invention.

[1052] All publications, patent applications, patents, and other references mentioned herein are incorporated by reference in their entirety. In case of conflict, the present specification, including definitions, will control. In addition, section headings, the materials, methods, and examples are illustrative only and not intended to be limiting.

### VIII. EXAMPLES

### Example 1. Design of Modulatory Polynucleotides (Artificial Pri- or Pre-microRNAs)

[1053] Artificial pri- or pre-microRNAs are designed to contain shRNA or stem loop structures encoding an artificial miR (or artificial siRNA or mature miRNA) having at least one strand that can at least partially hybridize with a target nucleic acid, e.g., RNA or DNA and one or more of the following features (a) UG motif at the base of basal stem, (b) a UGUG motif at the 5′ end of the miRNA loop, (c) Uridine at the 5′ end of guide strand, (d) a loop structure derived from a canonical microRNA such as miR-22, (e) a CNNC at the 3′ flanking sequence, (f) flanking regions from a canonical microRNA such as let-7b, (g) one or more wobble base-pairs, bulges and mismatches in the stem after guide and passenger stands, and/or (h) one or more wobble base-pairs, bulges and mismatches between the passenger and guide strand.

[1054] Once designed, the sequence is engineered or synthesized or inserted in a plasmid or vector and administered to a cell or organism. Suitable plasmids or vectors are any which transfect or transduce the target cell.

[1055] Adeno-associated viral vectors (AAV), viral particles or entire viruses may be used.

[1056] Administration results in the processing of the modulatory polynucleotide to generate the artificial microRNA which alters expression levels of the target nucleic acid.

[1057] Effective knockdown of a target may be determined by methods in the art and will show little if any off-target effects.

[1058] Effective passenger-guide strand duplexes of the modulatory polynucleotides, e.g., pri- or pre-microRNAs demonstrate greater than 8-10-fold guide to passenger strand ratio when processing is measured.

### Example 2. Passenger-Guide Strand Optimization

[1059] In order to achieve target knockdown or modulation of target expression which is specific and potent, the passenger and guide strands that will form the duplex stem of the stem-loop structure of the pri- or pre-microRNA of the invention may be optimized separately, for example as siRNA (small interfering RNAs).

[1060] siRNAs are designed against a target nucleic acid of choice as canonical siRNAs having a 19 base pair central duplex with a dinucleotide overhang on the 3′ end of the strands of the duplex and where the antisense strand (guide strand) has perfect complementarity to the target nucleic acid over the 19 nucleotide region.

[1061] Alternatively, siRNAs are designed whereby the sense strand (passenger strand) comprises less than 19 nucleotide identity to the target nucleic acid.

[1062] Modifications to the sense-antisense (passenger-guide) strand duplex base pairing is made to introduce wobbles, bulges or mismatches. Insertions or deletions or mismatches may be incorporated at the 5′ or 3′ terminus of the sense strand (passenter strand) and these insertions or deletions may or may not be mirrored on the antisense strand (guide strand).

[1063] The resulting siRNA are tested by standard methods known in the art for target knockdown and other relevant physiologic and pharmacokinetic properties and for degree of off-target effects.

[1064] siRNA exhibiting sufficient target knockdown with few off target effects are then engineered, either with or without further modifications, as the passenger and guide strands of the pri- or pre-microRNAs of the invention.

### Example 3. Pri and Pre-microRNAs Targeting HTT

[1065] The passenger-guide strand duplexes found to be efficacious are engineered into expression vectors and transfected into cells of the central nervous system or neuronal cell lines or immortalized cell lines of other origins. Even though overhang utilized in the siRNA knockdown study is a canonical dTdT for siRNA, the overhang in the synthetic pri- or pre-miR may comprise any dinucleotide overhang.

[1066] The cells used may be primary cells or derived from induced pluripotent stem cells (iPS cells).

[1067] The knockdown of the target is then measured and deep sequencing performed to determine the exact passenger and guide strand processed from each pri- or pre-microRNA administered in the expression vector.

[1068] A guide to passenger strand ratio is calculated to determine the efficiency of assembly, e.g., assembly into RNA Induced Silencing Complex (RISC).

[1069] The 5′ end of guide and passenger strands are sequenced to determine the cleavage site and to determine the 5′ end processing precision. It is expected that processing precision will be higher than 85 percent.

[1070] HeLa cells are co-transfected in a parallel study to analyze in vitro knockdown of the target. In parallel, a cell-base luciferase reporter assay is established; a luciferase construct containing guide strand target site is used to assess on-target effect and a construct with passenger strand target site is used to determine off-target (passenger strand) effects.

[1071] Deep sequencing is again performed.

### Example 4. Pri-miRNA Constructs in AAV-miRNA Vectors

[1072] Passenger-guide strand duplexes of the designed siRNA are engineered into AAV-miRNA expression vectors. The construct from ITR to ITR, recited 5′ to 3′, comprises a mutant or wild-type ITR, a promoter (either a CMV, a H1, a U6 or the CBA promoter (which includes a CMVie enhancer, a CB promoter and an SV40 or a human betaGlobin intron)), the pri-miRNA construct for the target, a rabbit globin or human growth hormone polyA and wildtype ITR. In vitro and in vivo studies are performed to test the efficacy of the AAV-miRNA expression vectors.

1.-20. (canceled)

21. A modulatory polynucleotide comprising:
(i) a 5′ flanking region comprising the nucleotide sequence of SEQ ID NO: 7;
(ii) a passenger strand;
(iii) a loop region comprising the nucleotide sequence of SEQ ID NO: 16;
(iv) a guide strand; and
(v) a 3′ flanking region comprising the nucleotide sequence of SEQ ID NO: 26;
wherein the modulatory polynucleotide targets a SOD1 gene.

22. The modulatory polynucleotide of claim 21, wherein the passenger strand is located between the 5′ flanking region and the loop region and the guide strand is located between the loop region and the 3′ flanking region.

23. The modulatory polynucleotide of claim 21, wherein the guide strand is located between the 5′ flanking region and the loop region and the passenger strand is located between the loop region and the 3′ flanking region.

24. The modulatory polynucleotide of claim 21, wherein the guide strand, passenger strand, or both the guide strand and the passenger strand are each 15-30 nucleotides in length.

25. The modulatory polynucleotide of claim 21, wherein the guide strand and passenger strand are each 21 or 22 nucleotides in length.

26. The modulatory polynucleotide of claim 21, wherein the passenger strand is at least 70% complementary to the guide strand.

27. A viral genome which comprises a nucleotide sequence positioned between two inverted terminal repeats (ITRs), wherein the nucleotide sequence encodes the modulatory polynucleotide of claim 21.

28. The viral genome of claim 27, which further comprises a promoter operably linked to the nucleotide sequence encoding the modulatory polynucleotide

29. The viral genome of claim 28, wherein the promoter is a ubiquitous promoter.

30. The viral genome of claim 28, wherein the promoter is a tissue-specific promoter.

31. The viral genome of claim 28, wherein the promoter is an H1 promoter, a CBA promoter, a CMV promoter, a PGK promoter, a T7 promoter, a UBC promoter, a GUSB promoter, an NSE promoter, a synapsin promoter, a MeCP2 promoter, or a GFAP promoter.

32. The viral genome of claim 28, wherein the promoter is an H1 promoter.

33. The viral genome of claim 27, which further comprises an enhancer, an intron, and/or a poly A signal region.

34. A recombinant adeno-associated virus (rAAV) comprising the viral genome of claim 27, and an AAV capsid protein, wherein the AAV capsid protein comprises an AAV9 capsid protein or a variant thereof.

35. A vector encoding the modulatory polynucleotide of claim 21.

36. An isolated cell comprising the modulatory polynucleotide of claim 21, wherein the cell is a mammalian cell, an HEK293 cell, an insect cell, an Sf9 cell, a cell of the central nervous system, a neuron, medium spiny neuron, a motor neuron, or an astrocyte.

37. A pharmaceutical composition comprising the rAAV of claim 34, and a pharmaceutically acceptable excipient.

38. A method of treating ALS in a subject, the method comprising administering the rAAV of claim 34 to the subject, thereby treating ALS in the subject.

39. The method of claim 38, wherein the rAAV is administered to the subject intravenously, via intracisternal injection, intravascularly, or intraventricularly.

40. An in vitro method of producing a recombinant adeno-associated virus (rAAV) comprising providing a cell with a polynucleotide comprising the viral genome of claim 27, at least one polynucleotide encoding AAV rep genes, and at least one polynucleotide encoding AAV cap genes; and harvesting the recombinant AAV from the cell.

The application's sequence listing, which the Patent Office published only in electronic form, follows.

SEQUENCE LISTING (942 sequences)

SEQ ID NO: 1 - RNA, 50 nt, synthetic construct
  misc_feature 1..50: note = Description of Artificial Sequence: Synthetic oligonucleotide
  source 1..50: mol_type = other RNA
tttatgcctcatcctctgagtgctgaaggcttgctgtaggctgtatgctg

SEQ ID NO: 2 - RNA, 54 nt, synthetic construct
  misc_feature 1..54: note = Description of Artificial Sequence: Synthetic oligonucleotide
  source 1..54: mol_type = other RNA
gtgctgggcggggggcggcgggccctcccgcagaacaccatgcgctcttcggaa

SEQ ID NO: 3 - RNA, 100 nt, synthetic construct
  misc_feature 1..100: note = Description of Artificial Sequence: Synthetic polynucleotide
  source 1..100: mol_type = other RNA
gaagcaaagaaggggcagagggagcccgtgagctgagtgggccagggactgggagaaggagtgaggaggcagggccggcatgcctctgctgctggccaga

SEQ ID NO: 4 - RNA, 54 nt, synthetic construct
  misc_feature 1..54: note = Description of Artificial Sequence: Synthetic oligonucleotide
  source 1..54: mol_type = other RNA
gtgctgggcggggggcggcgggccctcccgcagaacaccatgcgctcttcggga

SEQ ID NO: 5 - RNA, 54 nt, synthetic construct
  misc_feature 1..54: note = Description of Artificial Sequence: Synthetic oligonucleotide
  source 1..54: mol_type = other RNA
gtgctgggcggggggcggcgggccctcccgcagaacaccatgcgctccacggaa

SEQ ID NO: 6 - RNA, 35 nt, synthetic construct
  misc_feature 1..35: note = Description of Artificial Sequence: Synthetic oligonucleotide
  source 1..35: mol_type = other RNA
gggccctcccgcagaacaccatgcgctccacggaa

SEQ ID NO: 7 - RNA, 30 nt, synthetic construct
  misc_feature 1..30: note = Description of Artificial Sequence: Synthetic oligonucleotide
  source 1..30: mol_type = other RNA
ctcccgcagaacaccatgcgctccacggaa

SEQ ID NO: 8 - RNA, 55 nt, synthetic construct
  misc_feature 1..55: note = Description of Artificial Sequence: Synthetic oligonucleotide
  source 1..55: mol_type = other RNA
gtgctgggcggggggcggcgggccctcccgcagaacaccatgcgctccacggaag

SEQ ID NO: 9 - RNA, 54 nt, synthetic construct
  misc_feature 1..54: note = Description of Artificial Sequence: Synthetic oligonucleotide
  source 1..54: mol_type = other RNA
gtgctgggcggggggcggcgggccctcccgcagaacaccatgcgctcctcggaa

SEQ ID NO: 10 - RNA, 10 nt, synthetic construct
  misc_feature 1..10: note = Description of Artificial Sequence: Synthetic oligonucleotide
  source 1..10: mol_type = other RNA
tgtgacctgg

SEQ ID NO: 11 - RNA, 10 nt, synthetic construct
  misc_feature 1..10: note = Description of Artificial Sequence: Synthetic oligonucleotide
  source 1..10: mol_type = other RNA
tgtgatttgg

SEQ ID NO: 12 - RNA, 10 nt, synthetic construct
  misc_feature 1..10: note = Description of Artificial Sequence: Synthetic oligonucleotide
  source 1..10: mol_type = other RNA
tataatttgg

SEQ ID NO: 13 - RNA, 11 nt, synthetic construct
  misc_feature 1..11: note = Description of Artificial Sequence: Synthetic oligonucleotide
  source 1..11: mol_type = other RNA
cctgacccagt

SEQ ID NO: 14 - RNA, 18 nt, synthetic construct
  misc_feature 1..18: note = Description of Artificial Sequence: Synthetic oligonucleotide
  source 1..18: mol_type = other RNA
gtctgcacctgtcactag

SEQ ID NO: 15 - RNA, 10 nt, synthetic construct
  misc_feature 1..10: note = Description of Artificial Sequence: Synthetic oligonucleotide
  source 1..10: mol_type = other RNA
gtgacccaag

SEQ ID NO: 16 - RNA, 15 nt, synthetic construct
  misc_feature 1..15: note = Description of Artificial Sequence: Synthetic oligonucleotide
  source 1..15: mol_type = other RNA
gtggccactgagaag

SEQ ID NO: 17 - RNA, 10 nt, synthetic construct
  misc_feature 1..10: note = Description of Artificial Sequence: Synthetic oligonucleotide
  source 1..10: mol_type = other RNA
gtgacccaat

SEQ ID NO: 18 - RNA, 10 nt, synthetic construct
  misc_feature 1..10: note = Description of Artificial Sequence: Synthetic oligonucleotide
  source 1..10: mol_type = other RNA
gtgacccaac

SEQ ID NO: 19 - RNA, 15 nt, synthetic construct
  misc_feature 1..15: note = Description of Artificial Sequence: Synthetic oligonucleotide
  source 1..15: mol_type = other RNA
gtggccactgagaaa

SEQ ID NO: 20 - RNA, 50 nt, synthetic construct
  misc_feature 1..50: note = Description of Artificial Sequence: Synthetic oligonucleotide
  source 1..50: mol_type = other RNA
agtgtatgatgcctgttactagcattcacatggaacaaattgctgccgtg

SEQ ID NO: 21 - RNA, 52 nt, synthetic construct
  misc_feature 1..52: note = Description of Artificial Sequence: Synthetic oligonucleotide
  source 1..52: mol_type = other RNA
ctgaggagcgccttgacagcagccatgggagggccgccccctacctcagtga

SEQ ID NO: 22 - RNA, 52 nt, synthetic construct
  misc_feature 1..52: note = Description of Artificial Sequence: Synthetic oligonucleotide
  source 1..52: mol_type = other RNA
ctgtggagcgccttgacagcagccatgggagggccgccccctacctcagtga

SEQ ID NO: 23 - RNA, 100 nt, synthetic construct
  misc_feature 1..100: note = Description of Artificial Sequence: Synthetic polynucleotide
  source 1..100: mol_type = other RNA
tggccgtgtagtgctacccagcgctggctgcctcctcagcattgcaattcctctcccatctgggcaccagtcagctaccctggtgggaatctgggtagcc

SEQ ID NO: 24 - RNA, 99 nt, synthetic construct
  misc_feature 1..99: note = Description of Artificial Sequence: Synthetic oligonucleotide
  source 1..99: mol_type = other RNA
ggccgtgtagtgctacccagcgctggctgcctcctcagcattgcaattcctctcccatctgggcaccagtcagctaccctggtgggaatctgggtagcc

SEQ ID NO: 25 - RNA, 54 nt, synthetic construct
  misc_feature 1..54: note = Description of Artificial Sequence: Synthetic oligonucleotide
  source 1..54: mol_type = other RNA
tcctgaggagcgccttgacagcagccatgggagggccgccccctacctcagtga

SEQ ID NO: 26 - RNA, 35 nt, synthetic construct
  misc_feature 1..35: note = Description of Artificial Sequence: Synthetic oligonucleotide
  source 1..35: mol_type = other RNA
ctgaggagcgccttgacagcagccatgggagggcc

SEQ ID NO: 27 - RNA, 52 nt, synthetic construct
  misc_feature 1..52: note = Description of Artificial Sequence: Synthetic oligonucleotide
  source 1..52: mol_type = other RNA
ctgcggagcgccttgacagcagccatgggagggccgccccctacctcagtga

SEQ ID NO: 28 - DNA, 2211 bp, Adeno-associated virus 1
  source 1..2211: mol_type = unassigned DNA
atggctgccgatggttatcttccagattggctcgaggacaacctctctgagggcattcgcgagtggtgggacttgaaacctggagccccgaagcccaaagccaaccagcaaaagcaggacgacggccggggtctggtgcttcctggctacaagtacctcggacccttcaacggactcgacaagggggagcccgtcaacgcggcggacgcagcggccctcgagcacgacaaggcctacgaccagcagctcaaagcgggtgacaatccgtacctgcggtataaccacgccgacgccgagtttcaggagcgtctgcaagaagatacgtcttttgggggcaacctcgggcgagcagtcttccaggccaagaagcgggttctcgaacctctcggtctggttgaggaaggcgctaagacggctcctggaaagaaacgtccggtagagcagtcgccacaagagccagactcctcctcgggcatcggcaagacaggccagcagcccgctaaaaagagactcaattttggtcagactggcgactcagagtcagtccccgatccacaacctctcggagaacctccagcaacccccgctgctgtgggacctactacaatggcttcaggcggtggcgcaccaatggcagacaataacgaaggcgccgacggagtgggtaatgcctcaggaaattggcattgcgattccacatggctgggcgacagagtcatcaccaccagcacccgcacctgggccttgcccacctacaataaccacctctacaagcaaatctccagtgcttcaacgggggccagcaacgacaaccactacttcggctacagcaccccctgggggtattttgatttcaacagattccactgccacttttcaccacgtgactggcagcgactcatcaacaacaattggggattccggcccaagagactcaacttcaaactcttcaacatccaagtcaaggaggtcacgacgaatgatggcgtcacaaccatcgctaataaccttaccagcacggttcaagtcttctcggactcggagtaccagcttccgtacgtcctcggctctgcgcaccagggctgcctccctccgttcccggcggacgtgttcatgattccgcaatacggctacctgacgctcaacaatggcagccaagccgtgggacgttcatccttttactgcctggaatatttcccttctcagatgctgagaacgggcaacaactttaccttcagctacacctttgaggaagtgcctttccacagcagctacgcgcacagccagagcctggaccggctgatgaatcctctcatcgaccaatacctgtattacctgaacagaactcaaaatcagtccggaagtgcccaaaacaaggacttgctgtttagccgtgggtctccagctggcatgtctgttcagcccaaaaactggctacctggaccctgttatcggcagcagcgcgtttctaaaacaaaaacagacaacaacaacagcaattttacctggactggtgcttcaaaatataacctcaatgggcgtgaatccatcatcaaccctggcactgctatggcctcacacaaagacgacgaagacaagttctttcccatgagcggtgtcatgatttttggaaaagagagcgccggagcttcaaacactgcattggacaatgtcatgattacagacgaagaggaaattaaagccactaaccctgtggccaccgaaagatttgggaccgtggcagtcaatttccagagcagcagcacagaccctgcgaccggagatgtgcatgctatgggagcattacctggcatggtgtggcaagatagagacgtgtacctgcagggtcccatttgggccaaaattcctcacacagatggacactttcacccgtctcctcttatgggcggctttggactcaagaacccgcctcctcagatcctcatcaaaaacacgcctgttcctgcgaatcctccggcggagttttcagctacaaagtttgcttcattcatcacccaatactccacaggacaagtgagtgtggaaattgaatgggagctgcagaaagaaaacagcaagcgctggaatcccgaagtgcagtacacatccaattatgcaaaatctgccaacgttgattttactgtggacaacaatggactttatactgagcctcgccccattggcacccgttaccttacccgtcccctgtaa

SEQ ID NO: 29 - protein, 736 aa, Adeno-associated virus 1
MAADGYLPDWLEDNLSEGIREWWDLKPGAPKPKANQQKQDDGRGLVLPGYKYLGPFNGLDKGEPVNAADAAALEHDKAYDQQLKAGDNPYLRYNHADAEFQERLQEDTSFGGNLGRAVFQAKKRVLEPLGLVEEGAKTAPGKKRPVEQSPQEPDSSSGIGKTGQQPAKKRLNFGQTGDSESVPDPQPLGEPPATPAAVGPTTMASGGGAPMADNNEGADGVGNASGNWHCDSTWLGDRVITTSTRTWALPTYNNHLYKQISSASTGASNDNHYFGYSTPWGYFDFNRFHCHFSPRDWQRLINNNWGFRPKRLNFKLFNIQVKEVTTNDGVTTIANNLTSTVQVFSDSEYQLPYVLGSAHQGCLPPFPADVFMIPQYGYLTLNNGSQAVGRSSFYCLEYFPSQMLRTGNNFTFSYTFEEVPFHSSYAHSQSLDRLMNPLIDQYLYYLNRTQNQSGSAQNKDLLFSRGSPAGMSVQPKNWLPGPCYRQQRVSKTKTDNNNSNFTWTGASKYNLNGRESIINPGTAMASHKDDEDKFFPMSGVMIFGKESAGASNTALDNVMITDEEEIKATNPVATERFGTVAVNFQSSSTDPATGDVHAMGALPGMVWQDRDVYLQGPIWAKIPHTDGHFHPSPLMGGFGLKNPPPQILIKNTPVPANPPAEFSATKFASFITQYSTGQVSVEIEWELQKENSKRWNPEVQYTSNYAKSANVDFTVDNNGLYTEPRPIGTRYLTRPL

SEQ ID NO: 30 - DNA, 4718 bp, Adeno-associated virus 1
  source 1..4718: mol_type = unassigned DNA
ttgcccactccctctctgcgcgctcgctcgctcggtggggcctgcggaccaaaggtccgcagacggcagagctctgctctgccggccccaccgagcgagcgagcgcgcagagagggagtgggcaactccatcactaggggtaatcgcgaagcgcctcccacgctgccgcgtcagcgctgacgtaaattacgtcataggggagtggtcctgtattagctgtcacgtgagtgcttttgcgacattttgcgacaccacgtggccatttagggtatatatggccgagtgagcgagcaggatctccattttgaccgcgaaatttgaacgagcagcagccatgccgggcttctacgagatcgtgatcaaggtgccgagcgacctggacgagcacctgccgggcatttctgactcgtttgtgagctgggtggccgagaaggaatgggagctgcccccggattctgacatggatctgaatctgattgagcaggcacccctgaccgtggccgagaagctgcagcgcgacttcctggtccaatggcgccgcgtgagtaaggccccggaggccctcttctttgttcagttcgagaagggcgagtcctacttccacctccatattctggtggagaccacgggggtcaaatccatggtgctgggccgcttcctgagtcagattagggacaagctggtgcagaccatctaccgcgggatcgagccgaccctgcccaactggttcgcggtgaccaagacgcgtaatggcgccggaggggggaacaaggtggtggacgagtgctacatccccaactacctcctgcccaagactcagcccgagctgcagtgggcgtggactaacatggaggagtatataagcgcctgtttgaacctggccgagcgcaaacggctcgtggcgcagcacctgacccacgtcagccagacccaggagcagaacaaggagaatctgaaccccaattctgacgcgcctgtcatccggtcaaaaacctccgcgcgctacatggagctggtcgggtggctggtggaccggggcatcacctccgagaagcagtggatccaggaggaccaggcctcgtacatctccttcaacgccgcttccaactcgcggtcccagatcaaggccgctctggacaatgccggcaagatcatggcgctgaccaaatccgcgcccgactacctggtaggccccgctccgcccgcggacattaaaaccaaccgcatctaccgcatcctggagctgaacggctacgaacctgcctacgccggctccgtctttctcggctgggcccagaaaaggttcgggaagcgcaacaccatctggctgtttgggccggccaccacgggcaagaccaacatcgcggaagccatcgcccacgccgtgcccttctacggctgcgtcaactggaccaatgagaactttcccttcaatgattgcgtcgacaagatggtgatctggtgggaggagggcaagatgacggccaaggtcgtggagtccgccaaggccattctcggcggcagcaaggtgcgcgtggaccaaaagtgcaagtcgtccgcccagatcgaccccacccccgtgatcgtcacctccaacaccaacatgtgcgccgtgattgacgggaacagcaccaccttcgagcaccagcagccgttgcaggaccggatgttcaaatttgaactcacccgccgtctggagcatgactttggcaaggtgacaaagcaggaagtcaaagagttcttccgctgggcgcaggatcacgtgaccgaggtggcgcatgagttctacgtcagaaagggtggagccaacaaaagacccgcccccgatgacgcggataaaagcgagcccaagcgggcctgcccctcagtcgcggatccatcgacgtcagacgcggaaggagctccggtggactttgccgacaggtaccaaaacaaatgttctcgtcacgcgggcatgcttcagatgctgtttccctgcaagacatgcgagagaatgaatcagaatttcaacatttgcttcacgcacgggacgagagactgttcagagtgcttccccggcgtgtcagaatctcaaccggtcgtcagaaagaggacgtatcggaaactctgtgccattcatcatctgctggggcgggctcccgagattgcttgctcggcctgcgatctggtcaacgtggacctggatgactgtgtttctgagcaataaatgacttaaaccaggtatggctgccgatggttatcttccagattggctcgaggacaacctctctgagggcattcgcgagtggtgggacttgaaacctggagccccgaagcccaaagccaaccagcaaaagcaggacgacggccggggtctggtgcttcctggctacaagtacctcggacccttcaacggactcgacaagggggagcccgtcaacgcggcggacgcagcggccctcgagcacgacaaggcctacgaccagcagctcaaagcgggtgacaatccgtacctgcggtataaccacgccgacgccgagtttcaggagcgtctgcaagaagatacgtcttttgggggcaacctcgggcgagcagtcttccaggccaagaagcgggttctcgaacctctcggtctggttgaggaaggcgctaagacggctcctggaaagaaacgtccggtagagcagtcgccacaagagccagactcctcctcgggcatcggcaagacaggccagcagcccgctaaaaagagactcaattttggtcagactggcgactcagagtcagtccccgatccacaacctctcggagaacctccagcaacccccgctgctgtgggacctactacaatggcttcaggcggtggcgcaccaatggcagacaataacgaaggcgccgacggagtgggtaatgcctcaggaaattggcattgcgattccacatggctgggcgacagagtcatcaccaccagcacccgcacctgggccttgcccacctacaataaccacctctacaagcaaatctccagtgcttcaacgggggccagcaacgacaaccactacttcggctacagcaccccctgggggtattttgatttcaacagattccactgccacttttcaccacgtgactggcagcgactcatcaacaacaattggggattccggcccaagagactcaacttcaaactcttcaacatccaagtcaaggaggtcacgacgaatgatggcgtcacaaccatcgctaataaccttaccagcacggttcaagtcttctcggactcggagtaccagcttccgtacgtcctcggctctgcgcaccagggctgcctccctccgttcccggcggacgtgttcatgattccgcaatacggctacctgacgctcaacaatggcagccaagccgtgggacgttcatccttttactgcctggaatatttcccttctcagatgctgagaacgggcaacaactttaccttcagctacacctttgaggaagtgcctttccacagcagctacgcgcacagccagagcctggaccggctgatgaatcctctcatcgaccaatacctgtattacctgaacagaactcaaaatcagtccggaagtgcccaaaacaaggacttgctgtttagccgtgggtctccagctggcatgtctgttcagcccaaaaactggctacctggaccctgttatcggcagcagcgcgtttctaaaacaaaaacagacaacaacaacagcaattttacctggactggtgcttcaaaatataacctcaatgggcgtgaatccatcatcaaccctggcactgctatggcctcacacaaagacgacgaagacaagttctttcccatgagcggtgtcatgatttttggaaaagagagcgccggagcttcaaacactgcattggacaatgtcatgattacagacgaagaggaaattaaagccactaaccctgtggccaccgaaagatttgggaccgtggcagtcaatttccagagcagcagcacagaccctgcgaccggagatgtgcatgctatgggagcattacctggcatggtgtggcaagatagagacgtgtacctgcagggtcccatttgggccaaaattcctcacacagatggacactttcacccgtctcctcttatgggcggctttggactcaagaacccgcctcctcagatcctcatcaaaaacacgcctgttcctgcgaatcctccggcggagttttcagctacaaagtttgcttcattcatcacccaatactccacaggacaagtgagtgtggaaattgaatgggagctgcagaaagaaaacagcaagcgctggaatcccgaagtgcagtacacatccaattatgcaaaatctgccaacgttgattttactgtggacaacaatggactttatactgagcctcgccccattggcacccgttaccttacccgtcccctgtaattacgtgttaatcaataaaccggttgattcgtttcagttgaactttggtctcctgtccttcttatcttatcggttaccatggttatagcttacacattaactgcttggttgcgcttcgcgataaaagacttacgtcatcgggttacccctagtgatggagttgcccactccctctctgcgcgctcgctcgctcggtggggcctgcggaccaaaggtccgcagacggcagagctctgctctgccggccccaccgagcgagcgagcgcgcagagagggagtgggcaa

SEQ ID NO: 31 - DNA, 3131 bp, Adeno-associated virus
  source 1..3131: mol_type = unassigned DNA
gcggccgcgaattcgcccttggctgcgtcaactggaccaatgagaactttcccttcaatgattgcgtcgacaagatggtgatctggtgggaggagggcaagatgacggccaaggtcgtggagtccgccaaggccattctcggcggcagcaaggtgcgcgtggaccaaaagtgcaagtcgtccgcccagatcgaccccacccccgtgatcgtcacctccaacaccaacatgtgcgccgtgattgacgggaacagcaccaccttcgagcaccagcagcctctccaggaccggatgtttaagttcgaactcacccgccgtctggagcacgactttggcaaggtgacaaagcaggaagtcaaagagttcttccgctgggccagtgatcacgtgaccgaggtggcgcatgagttttacgtcagaaagggcggagccagcaaaagacccgcccccgatgacgcggataaaagcgagcccaagcgggcctgcccctcagtcgcggatccatcgacgtcagacgcggaaggagctccggtggactttgccgacaggtaccaaaacaaatgttctcgtcacgcgggcatgcttcagatgctgtttccctgcaaaacgtgcgagagaatgaatcggaatttcaacatttgcttcacacacggggtcagagactgctcagagtgtttccccggcgtgtcagaatctcaaccggtcgtcagaaagaggacgtatcggaaactccgtgcgattcatcatctgctggggcgggctcccgagattgcttgctcggcctgcgatctggtcaacgtggacctggatgactgtgtttctgagcaataaatgacttaaaccaggtatggctgccgatggttatcttccagattggctcgaggacaacctctctgagggcattcgcgagtggtgggcgctgaaacctggagccccgaagcccaaagccaaccagcaaaagcaggacgacggccggggtctggtgcttcctggctacaagtacctcggacccttcaacggactcgacaagggggagcccgtcaacgcggcggacgcagcggccctcgagcacgacaaggcttacgaccagcagctgcaggcgggtgacaatccgtacctgcggtataaccacgccgacgccgagtttcaggagcgtctgcaagaagatacgtcttttgggggcaacctcgggcgagcagtcttccaggccaagaagcgggttctcgaacctctcggtctggttgaggaaggcgctaagacggctcctggaaagaagagaccggtagagccatcaccccagcgttctccagactcctctacgggcatcggcaagaaaggccaacagcccgccagaaaaagactcaattttggtcagactggcgactcagagtcagttccagaccctcaacctctcggagaacctccagcagcgccctctggtgtgggacctaatacaatggctgcaggcggtggcgcaccaatggcagacaataacgaaggcgccgacggagtgggtagttcctcgggaaattggcattgcgattccacatggctgggcgacagagtcatcaccaccagcacccgaacctgggccctgcccacctacaacaaccacctctacaagcaaatctccaacgggacatcgggaggagccaccaacgacaacacctacttcggctacagcaccccctgggggtattttgactttaacagattccactgccacctttcaccacgtgactggcagcgactcatcaacaacaactggggattccgacccaagagactcagcttcaagctcttcaacatccaggtcaaggaggtcacgcagaatgaaggcaccaagaccatcgccaataacctcaccagcaccatccaggtgtttacggactcggagtaccagctgccgtacgttctcggctctgtccaccagggctgcctgcctccgttcccggcggacgtgttcatgattccccagtacggctacctaacactcaacaacggtagtcaggccgtgggacgctcctccttctactgcctggaatactttccttcgcagatgctgagaaccggcaacaacttccagtttacttacaccttcgaggacgtgcctttccacagcagctacgcccacagctagagcttggaccggctgatgaatcctctgattgaccagtacctgtactacttgtctcggactcaaacaacaggaggcacggcaaatacgcagactctgggcttcagccaaggtgggcctaatacaatggccaatcaggcaaagaactggctgccaggaccctgttaccgccaacaacgcgtctcaacgacaaccgggcaaaacaacaatagcaactttgcctggactgctgggaccaaataccatctgaatggaagaaattcattggctaatcctggcatcgctatggcaacacacaaagacgacgaggagcgtttttttcccagtaacgggatcctgatttttggcaaacaaaatgctgccagagacaatgcggattacagcgatgtcatgctcaccagcgaggaagaaatcaaaaccactaaccctgtggctacagaggaatacggtatcgtggcagataacttgcagcagcaaaacacggctcctcaaattggaactgtcaacagccagggggccttacccggtatggtctggcagaaccgggacgtgtacctgcagggtcccatctgggccaagattcctcacacggacggcaacttccacccgtctccgctgatgggcggctttggcctgaaacatcctccgcctcagatcctgatcaagaacacgcctgtacctgcggatcctccgaccaccttcaaccagtcaaagctgaactctttcatcacgcaatacagcaccggacaggtcagcgtggaaattgaatgggagctgcagaaggaaaacagcaagcgctggaaccccgagatccagtacacctccaactactacaaatctataagtgtggactttgctgttaatacagaaggcgtgtactctgaaccccgccccattggcacccgttacctcacccgtaatctgtaattgcctgttaatcaataaaccggttgattcgtttcagttgaactttggtctctgcgaagggcgaattc

SEQ ID NO: 32 - DNA, 255 bp, Adeno-associated virus 10
  source 1..255: mol_type = unassigned DNA
ggtaattcctccggaaattggcattgcgattccacatggctgggcgacagagtcatcaccaccagcacccgaacctgggtcctgcccacctacaacaaccacatctacaagcaaatctccagcgagacaggagccaccaacgacaaccactacttcggctacagcaccccctgggggtattttgactttaacagattccactgccacttttcaccacgtgactggcagcgactcatcaacaacaactggggattc

SEQ ID NO: 33 - protein, 738 aa, Adeno-associated virus 10
MAADGYLPDWLEDNLSEGIREWWDLKPGAPKPKANQQKQDDGRGLVLPGYKYLGPFNGLDKGEPVNAADAAALEHDKAYDQQLKAGDNPYLRYNHADAEFQERLQEDTSFGGNLGRAVFQAKKRVLEPLGLVEEAAKTAPGKKRPVEPSPQRSPDSSTGIGKKGQQPAKKRLNFGQTGESESVPDPQPIGEPPAGPSGLGSGTMAAGGGAPMADNNEGADGVGSSSGNWHCDSTWLGDRVITTSTRTWALPTYNNHLYKQISNGTSGGSTNDNTYFGYSTPWGYFDFNRFHCHFSPRDWQRLINNNWGFRPKRLSFKLFNIQVKEVTQNEGTKTIANNLTSTIQVFTDSEYQLPYVLGSAHQGCLPPFPADVFMIPQYGYLTLNNGSQAVGRSSFYCLEYFPSQMLRTGNNFEFSYTFEDVPFHSSYAHSQSLDRLMNPLIDQYLYYLSRTQSTGGTQGTQQLLFSQAGPANMSAQAKNWLPGPCYRQQRVSTTLSQNNNSNFAWTGATKYHLNGRDSLVNPGVAMATHKDDEERFFPSSGVLMFGKQGAGRDNVDYSSVMLTSEEEIKTTNPVATEQYGVVADNLQQANTGPIVGNVNSQGALPGMVWQNRDVYLQGPIWAKIPHTDGNFHPSPLMGGFGLKHPPPQILIKNTPVPADPPTTFSQAKLASFITQYSTGQVSVEIEWELQKENSKRWNPEIQYTSNYYKSTNVDFAVNTEGTYSEPRPIGTRYLTRNL

SEQ ID NO: 34 - protein, 738 aa, Adeno-associated virus 10
MAADGYLPDWLEDNLSEGIREWWDLKPGAPKPKANQQKQDDGRGLVLPGYKYLGPFNGLDKGEPVNAADAAALEHDKAYDQQLKAGDNPYLRYNHADAEFQERLQEDTSFGGNLGRAVFQAKKRVLEPLGLVEEGAKTAPGKKRPVEPSPQRSPDSSTGIGKKGQQPAKKRLNFGQTGDSESVPDPQPIGEPPAGPSGLGSGTMAAGGGAPMADNNEGADGVGSSSGNWHCDSTWLGDRVITTSTRTWALPTYNNHLYKQISNGTSGGSTNDNTYFGYSTPWGYFDFNRFHCHFSPRDWQRLINNNWGFRPKRLNFKLFNIQVKEVTQNEGTKTIANNLTSTIQVFTDSEYQLPYVLGSAHQGCLPPFPADVFMIPQYGYLTLNNGSQAVGRSSFYCLEYFPSQMLRTGNNFEFSYQFEDVPFHSSYAHSQSLDRLMNPLIDQYLYYLSRTQSTGGTAGTQQLLFSQAGPNNMSAQAKNWLPGPCYRQQRVSTTLSQNNNSNFAWTGATKYHLNGRDSLVNPGVAMATHKDDEERFFPSSGVLMFGKQGAGKDNVDYSSVMLTSEEEIKTTNPVATEQYGVVADNLQQQNAAPIVGAVNSQGALPGMVWQNRDVYLQGPIWAKIPHTDGNFHPSPLMGGFGLKHPPPQILIKNTPVPADPPTTFSQAKLASFITQYSTGQVSVEIEWELQKENSKRWNPEIQYTSNYYKSTNVDFAVNTDGTYSEPRPIGTRYLTRNL

SEQ ID NO: 35 - DNA, 258 bp, Adeno-associated virus 11
  source 1..258: mol_type = unassigned DNA
ggtaattcctccggaaattggcattgcgattccacatggctgggcgacagagtcatcaccaccagcacccgaacctgggccctgccaacctacaacaaccacctctacaaacaaatctccagcgcttcaacgggggccagcaacgacaaccactactttggctacagcaccccctgggggtattttgactttaacagattccactgccacttctcaccacgtgactggcagcgactcatcaacaacaactggggattc

SEQ ID NO: 36 - DNA, 255 bp, Adeno-associated virus 12
  source 1..255: mol_type = unassigned DNA
ggtaattcctccggaaattggcattgcgattccacatggctgggcgaccgagtcattaccaccagcacccggacttgggccctgcccacctacaacaaccacctctacaagcaaatctccagccaatcgggtgccaccaacgacaaccactacttcggctacagcaccccttgggggtattttgatttcaacagattccactgccatttctcaccacgtgactggcagcgactcatcaacaacaactggggattc

SEQ ID NO: 37 - DNA, 2208 bp, Adeno-associated virus 2
  source 1..2208: mol_type = unassigned DNA
atggctgccgatggttatcttccagattggctcgaggacactctctctgaaggaataagacagtggtggaagctcaaacctggcccaccaccaccaaagcccgcagagcggcataaggacgacagcaggggtcttgtgcttcctgggtacaagtacctcggacccttcaacggactcgacaagggagagccggtcaacgaggcagacgccgcggccctcgagcacgacaaagcctacgaccggcagctcgacagcggagacaacccgtacctcaagtacaaccacgccgacgcggagtttcaggagcgccttaaagaagatacgtcttttgggggcaacctcggacgagcagtcttccaggcgaaaaagagggttcttgaacctctgggcctggttgaggaacctgttaagacggctccgggaaaaaagaggccggtagagcactctcctgtggagccagactcctcctcgggaaccggaaaggcgggccagcagcctgcaagaaaaagattgaattttggtcagactggagacgcagactcagtacctgacccccagcctctcggacagccaccagcagccccctctggtctgggaactaatacgatggctacaggcagtggcgcaccaatggcagacaataacgagggcgccgacggagtgggtaattcctcgggaaattggcattgcgattccacatggatgggcgacagagtcatcaccaccagcacccgaacctgggccctgcccacctacaacaaccacctctacaaacaaatttccagccaatcaggagcctcgaacgacaatcactactttggctacagcaccccttgggggtattttgacttcaacagattccactgccacttttcaccacgtgactggcaaagactcatcaacaacaactggggattccgacccaagagactcaacttcaagctctttaacattcaagtcaaagaggtcacgcagaatgacggtacgacgacgattgccaataaccttaccagcacggttcaggtgtttactgactcggagtaccagctcccgtacgtcctcggctcggcgcatcaaggatgcctcccgccgttcccagcagacgtcttcatggtgccacagtatggatacctcaccctgaacaacgggagtcaggcagtaggacgctcttcattttactgcctggagtactttccttctcagatgctgcgtaccggaaacaactttaccttcagctacacttttgaggacgttcctttccacagcagctacgctcacagccagagtctggaccgtctcatgaatcctctcatcgaccagtacctgtattacttgagcagaacaaacactccaagtggaaccaccacgcagtcaaggcttcagttttctcaggccggagcgagtgacattcgggaccagtctaggaactggcttcctggaccctgttaccgccagcagcgagtatcaaagacatctgcggataacaacaacagtgaatactcgtggactggagctaccaagtaccacctcaatggcagagactctctggtgaatccgggcccggccatggcaagccacaaggacgatgaagaaaagttttttcctcagagcggggttctcatctttgggaagcaaggctcagagaaaacaaatgtggacattgaaaaggtcatgattacagacgaagaggaaatcaggacaaccaatcccgtggctacggagcagtatggttctgtatctaccaacctccagagaggcaacagacaagcagctaccgcagatgtcaacacacaaggcgttcttccaggcatggtctggcaggacagagatgtgtaccttcaggggcccatctgggcaaagattccacacacggacggacattttcacccctctcccctcatgggtggattcggacttaaacaccctcctccacagattctcatcaagaacaccccggtacctgcgaatccttcgaccaccttcagtgcggcaaagtttgcttccttcatcacacagtactccacgggacaggtcagcgtggagatcgagtgggagctgcagaaggaaaacagcaaacgctggaatcccgaaattcagtacacttccaactacaacaagtctgttaatgtggactttactgtggacactaatggcgtgtattcagagcctcgccccattggcaccagatacctgactcgtaatctgtaa

SEQ ID NO: 38 - protein, 735 aa, Adeno-associated virus 2 [sequence omitted]

SEQ ID NO: 39 - protein, 621 aa, Adeno-associated virus 2
MPGFYEIVIKVPSDLDGHLPGISDSFVNWVAEKEWELPPDSDMDLNLIEQAPLTVAEKLQRDFLTEWRRVSKAPEALFFVQFEKGESYFHMHVLVETTGVKSMVLGRFLSQIREKLIQRIYRGIEPTLPNWFAVTKTRNGAGGGNKVVDECYIPNYLLPKTQPELQWAWTNMEQYLSACLNLTERKRLVAQHLTHVSQTQEQNKENQNPNSDAPVIRSKTSARYMELVGWLVDKGITSEKQWIQEDQASYISFNAASNSRSQIKAALDNAGKIMSLTKTAPDYLVGQQPVEDISSNRIYKILELNGYDPQYAASVFLGWATKKFGKRNTIWLFGPATTGKTNIAEAIAHTVPFYGCVNWTNENFPFNDCVDKMVIWWEEGKMTAKVVESAKAILGGSKVRVDQKCKSSAQIDPTPVIVTSNTNMCAVIDGNSTTFEHQQPLQDRMFKFELTRRLDHDFGKVTKQEVKDFFRWAKDHVVEVEHEFYVKKGGAKKRPAPSDADISEPKRVRESVAQPSTSDAEASINYADRYQNKCSRHVGMNLMLFPCRQCERMNQNSNICFTHGQKDCLECFPVSESQPVSVVKKAYQKLCYIHHIMGKVPDACTACDLVNVDLDDCIFEQ

SEQ ID NO: 40 - DNA, 4675 bp, Adeno-associated virus 2
  source 1..4675: mol_type = unassigned DNA
ttggccactccctctctgcgcgctcgctcgctcactgaggccgggcgaccaaaggtcgcccgacgcccgggctttgcccgggcggcctcagtgagcgagcgagcgcgcagagagggagtggccaactccatcactaggggttcctggaggggtggagtcgtgacgtgaattacgtcatagggttagggaggtcctgtattagaggtcacgtgagtgttttgcgacattttgcgacaccatgtggtcacgctgggtatttaagcccgagtgagcacgcagggtctccattttgaagcgggaggtttgaacgcgcagccgccatgccggggttttacgagattgtgattaaggtccccagcgaccttgacgggcatctgcccggcatttctgacagctttgtgaactgggtggccgagaaggaatgggagttgccgccagattctgacatggatctgaatctgattgagcaggcacccctgaccgtggccgagaagctgcagcgcgactttctgacggaatggcgccgtgtgagtaaggccccggaggcccttttctttgtgcaatttgagaagggagagagctacttccacatgcacgtgctcgtggaaaccaccggggtgaaatccatggttttgggacgtttcctgagtcagattcgcgaaaaactgattcagagaatttaccgcgggatcgagccgactttgccaaactggttcgcggtcacaaagaccagaaatggcgccggaggcgggaacaaggtggtggatgagtgctacatccccaattacttgctccccaaaacccagcctgagctccagtgggcgtggactaatatggaacagtatttaagcgcctgtttgaatctcacggagcgtaaacggttggtggcgcagcatctgacgcacgtgtcgcagacgcaggagcagaacaaagagaatcagaatcccaattctgatgcgccggtgatcagatcaaaaacttcagccaggtacatggagctggtcgggtggctcgtggacaaggggattacctcggagaagcagtggatccaggaggaccaggcctcatacatctccttcaatgcggcctccaactcgcggtcccaaatcaaggctgccttggacaatgcgggaaagattatgagcctgactaaaaccgcccccgactacctggtgggccagcagcccgtggaggacatttccagcaatcggatttataaaattttggaactaaacgggtacgatccccaatatgcggcttccgtctttctgggatgggccacgaaaaagttcggcaagaggaacaccatctggctgtttgggcctgcaactaccgggaagaccaacatcgcggaggccatagcccacactgtgcccttctacgggtgcgtaaactggaccaatgagaactttcccttcaacgactgtgtcgacaagatggtgatctggtgggaggaggggaagatgaccgccaaggtcgtggagtcggccaaagccattctcggaggaagcaaggtgcgcgtggaccagaaatgcaagtcctcggcccagatagacccgactcccgtgatcgtcacctccaacaccaacatgtgcgccgtgattgacgggaactcaacgaccttcgaacaccagcagccgttgcaagaccggatgttcaaatttgaactcacccgccgtctggatcatgactttgggaaggtcaccaagcaggaagtcaaagactttttccggtgggcaaaggatcacgtggttgaggtggagcatgaattctacgtcaaaaagggtggagccaagaaaagacccgcccccagtgacgcagatataagtgagcccaaacgggtgcgcgagtcagttgcgcagccatcgacgtcagacgcggaagcttcgatcaactacgcagacaggtaccaaaacaaatgttctcgtcacgtgggcatgaatctgatgctgtttccctgcagacaatgcgagagaatgaatcagaattcaaatatctgcttcactcacggacagaaagactgtttagagtgctttcccgtgtcagaatctcaacccgtttctgtcgtcaaaaaggcgtatcagaaactgtgctacattcatcatatcatgggaaaggtgccagacgcttgcactgcctgcgatctggtcaatgtggatttggatgactgcatctttgaacaataaatgatttaaatcaggtatggctgccgatggttatcttccagattggctcgaggacactctctctgaaggaataagacagtggtggaagctcaaacctggcccaccaccaccaaagcccgcagagcggcataaggacgacagcaggggtcttgtgcttcctgggtacaagtacctcggacccttcaacggactcgacaagggagagccggtcaacgaggcagacgccgcggccctcgagcacgtacaaagcctacgaccggcagctcgacagcggagacaacccgtacctcaagtacaaccacgccgacgcggagtttcaggagcgccttaaagaagatacgtcttttgggggcaacctcggacgagcagtcttccaggcgaaaaagagggttcttgaacctctgggcctggttgaggaacctgttaagacggctccgggaaaaaagaggccggtagagcactctcctgtggagccagactcctcctcgggaaccggaaaggcgggccagcagcctgcaagaaaaagattgaattttggtcagactggagacgcagactcagtacctgacccccagcctctcggacagccaccagcagccccctctggtctgggaactaatacgatggctacaggcagtggcgcaccaatggcagacaataacgagggcgccgacggagtgggtaattcctccggaaattggcattgcgattccacatggatgggcgacagagtcatcaccaccagcacccgaacctgggccctgcccacctacaacaaccacctctacaaacaaatttccagccaatcaggagcctcgaacgacaatcactactttggctacagcaccccttgggggtattttgacttcaacagattccactgccacttttcaccacgtgactggcaaagactcatcaacaacaactggggattccgacccaagagactcaacttcaagctctttaacattcaagtcaaagaggtcacgcagaatgacggtacgacgacgattgccaataaccttaccagcacggttcaggtgtttactgactcggagtaccagctcccgtacgtcctcggctcggcgcatcaaggatgcctcccgccgttcccagcagacgtcttcatggtgccacagtatggatacctcaccctgaacaacgggagtcaggcagtaggacgctcttcattttactgcctggagtactttccttctcagatgctgcgtaccggaaacaactttaccttcagctacacttttgaggacgttcctttccacagcagctacgctcacagccagagtctggaccgtctcatgaatcctctcatcgaccagtacctgtattacttgagcagaacaaacactccaagtggaaccaccacgcagtcaaggcttcagttttctcaggccggagcgagtgacattcgggaccagtctaggaactggcttcctggaccctgttaccgccagcagcgagtatcaaagacatctgcggataacaacaacagtgaatactcgtggactggagctaccaagtaccacctcaatggcagagactctctggtgaatccggccatggcaagccacaaggacgatgaagaaaagttttttcctcagagcggggttctcatctttgggaagcaaggctcagagaaaacaaatgtgaacattgaaaaggtcatgattacagacgaagaggaaatcggaacaaccaatcccgtggctacggagcagtatggttctgtatctaccaacctccagagaggcaacagacaagcagctaccgcagatgtcaacacacaaggcgttcttccaggcatggtctggcaggacagagatgtgtaccttcaggggcccatctgggcaaagattccacacacggacggacattttcacccctctcccctcatgggtggattcggacttaaacaccctcctccacagattctcatcaagaacaccccggtacctgcgaatccttcgaccaccttcagtgcggcaaagtttgcttccttcatcacacagtactccacgggacacggtcagcgtggagatcgagtgggagctgcagaaggaaaacagcaaacgctggaatcccgaaattcagtacacttccaactacaacaagtctgttaatcgtggacttaccgtggatactaatggcgtgtattcagagcctcgccccattggcaccagatacctgactcgtaatctgtaattgcttgttaatcaataaaccgtttaattcgtttcagttgaactttggtctctgcgtatttctttcttatctagtttccatggctacgtagataagtagcatggcgggttaatcattaactacaaggaacccctagtgatggagttggccactccctctctgcgcgctcgctcgctcactgaggccgggcgaccaaaggtcgcccgacgcccgggctttgcccgggcggcctcagtgagcgagcgagcgcgcagagagggagtggccaa

SEQ ID NO: 41 - DNA, 4679 bp, Adeno-associated virus 2
  source 1..4679: mol_type = unassigned DNA
ttggccactccctctctgcgcgctcgctcgctcactgaggccgggcgaccaaaggtcgcccgacgcccgggctttgcccgggcggcctcagtgagcgagcgagcgcgcagagagggagtggccaactccatcactaggggttcctggaggggtggagtcgtgacgtgaattacgtcatagggttagggaggtcctgtattagaggtcacgtgagtgttttgcgacattttgcgacaccatgtggtcacgctgggtatttaagcccgagtgagcacgcagggtctccattttgaagcgggaggtttgaacgcgcagccgccatgccggggttttacgagattgtgattaaggtccccagcgaccttgacgggcatctgcccggcatttctgacagctttgtgaactgggtggccgagaaggaatgggagttgccgccagattctgacatggatctgaatctgattgagcaggcacccctgaccgtggccgagaagctgcagcgcgactttctgacggaatggcgccgtgtgagtaaggccccggaggcccttttctttgtgcaatttgagaagggagagagctacttccacatgcacgtgctcgtggaaaccaccggggtgaaatccatggttttgggacgtttcctgagtcagattcgcgaaaaactgattcagagaatttaccgcgggatcgagccgactttgccaaactggttcgcggtcacaaagaccagaaatggcgccggaggcgggaacaaggtggtggatgagtgctacatccccaattacttgctccccaaaacccagcctgagctccagtgggcgtggactaatatggaacagtatttaagcgcctgtttgaatctcacggagcgtaaacggttggtggcgcagcatctgacgcacgtgtcgcagacgcaggagcagaacaaagagaatcagaatcccaattctgatgcgccggtgatcagatcaaaaacttcagccaggtacatggagctggtcgggtggctcgtggacaaggggattacctcggagaagcagtggatccaggaggaccaggcctcatacatctccttcaatgcggcctccaactcgcggtcccaaatcaaggctgccttggacaatgcgggaaagattatgagcctgactaaaaccgcccccgactacctggtgggccagcagcccgtggaggacatttccagcaatcggatttataaaattttggaactaaacgggtacgatccccaatatgcggcttccgtctttctgggatgggccacgaaaaagttcggcaagaggaacaccatctggctgtttgggcctgcaactaccgggaagaccaacatcgcggaggccatagcccacactgtgcccttctacgggtgcgtaaactggaccaatgagaactttcccttcaacgactgtgtcgacaagatggtgatctggtgggaggaggggaagatgaccgccaaggtcgtggagtcggccaaagccattctcggaggaagcaaggtgcgcgtggaccagaaatgcaagtcctcggcccagatagacccgactcccgtgatcgtcacctccaacaccaacatgtgcgccgtgattgacgggaactcaacgaccttcgaacaccagcagccgttgcaagaccggatgttcaaatttgaactcacccgccgtctggatcatgactttgggaaggtcaccaagcaggaagtcaaagactttttccggtgggcaaaggatcacgtggttgaggtggagcatgaattctacgtcaaaaagggtggagccaagaaaagacccgcccccagtgacgcagatataagtgagcccaaacgggtgcgcgagtcagttgcgcagccatcgacgtcagacgcggaagcttcgatcaactacgcagacaggtaccaaaacaaatgttctcgtcacgtgggcatgaatctgatgctgtttccctgcagacaatgcgagagaatgaatcagaattcaaatatctgcttcactcacggacagaaagactgtttagagtgctttcccgtgtcagaatctcaacccgtttctgtcgtcaaaaaggcgtatcagaaactgtgctacattcatcatatcatgggaaaggtgccagacgcttgcactgcctgcgatctggtcaatgtggatttggatgactgcatctttgaacaataaatgatttaaatcaggtatggctgccgatggttatcttccagattggctcgaggacactctctctgaaggaataagacagtggtggaagctcaaacctggcccaccaccaccaaagcccgcagagcggcataaggacgacagcaggggtcttgtgcttcctgggtacaagtacctcggacccttcaacggactcgacaagggagagccggtcaacgaggcagacgccgcggccctcgagcacgacaaagcctacgaccggcagctcgacagcggagacaacccgtacctcaagtacaaccacgccgacgcggagtttcaggagcgccttaaagaagatacgtcttttgggggcaacctcggacgagcagtcttccaggcgaaaaagagggttcttgaacctctgggcctggttgaggaacctgttaagacggctccgggaaaaaagaggccggtagagcactctcctgtggagccagactcctcctcgggaaccggaaaggcgggccagcagcctgcaagaaaaagattgaattttggtcagactggagacgcagactcagtacctgacccccagcctctcggacagccaccagcagccccctctggtctgggaactaatacgatggctacaggcagtggcgcaccaatggcagacaataacgagggcgccgacggagtgggtaattcctccggaaattggcattgcgattccacatggatgggcgacagagtcatcaccaccagcacccgaacctgggccctgcccacctacaacaaccacctctacaaacaaatttccagccaatcaggagcctcgaacgacaatcactactttggctacagcaccccttgggggtattttgacttcaacagattccactgccacttttcaccacgtgactggcaaagactcatcaacaacaactggggattccgacccaagagactcaacttcaagctctttaacattcaagtcaaagaggtcacgcagaatgacggtacgacgacgattgccaataaccttaccagcacggttcaggtgtttactgactcggagtaccagctcccgtacgtcctcggctcggcgcatcaaggatgcctcccgccgttcccagcagacgtcttcatggtgccacagtatggatacctcaccctgaacaacgggagtcaggcagtaggacgctcttcattttactgcctggagtactttccttctcagatgctgcgtaccggaaacaactttaccttcagctacacttttgaggacgttcctttccacagcagctacgctcacagccagagtctggaccgtctcatgaatcctctcatcgaccagtacctgtattacttgagcagaacaaacactccaagtggaaccaccacgcagtcaaggcttcagttttctcaggccggagcgagtgacattcgggaccagtctaggaactggcttcctggaccctgttaccgccagcagcgagtatcaaagacatctgcggataacaacaacagtgaatactcgtggactggagctaccaagtaccacctcaatggcagagactctctggtgaatccgggcccggccatggcaagccacaaggacgatgaagaaaagttttttcctcagagcggggttctcatctttgggaagcaaggctcagagaaaacaaatgtggacattgaaaaggtcatgattacagacgaagaggaaatcaggacaaccaatcccgtggctacggagcagtatggttctgtatctaccaacctccagagaggcaacagacaagcagctaccgcagatgtcaacacacaaggcgttcttccaggcatggtctggcaggacagagatgtgtaccttcaggggcccatctgggcaaagattccacacacggacggacattttcacccctctcccctcatgggtggattcggacttaaacaccctcctccacagattctcatcaagaacaccccggtacctgcgaatccttcgaccaccttcagtgcggcaaagtttgcttccttcatcacacagtactccacgggacaggtcagcgtggagatcgagtgggagctgcagaaggaaaacagcaaacgctggaatcccgaaattcagtacacttccaactacaacaagtctgttaatgtggactttactgtggacactaatggcgtgtattcagagcctcgccccattggcaccagatacctgactcgtaatctgtaattgcttgttaatcaataaaccgtttaattcgtttcagttgaactttggtctctgcgtatttctttcttatctagtttccatggctacgtagataagtagcatggcgggttaatcattaactacaaggaacccctagtgatggagttggccactccctctctgcgcgctcgctcgctcactgaggccgggcgaccaaaggtcgcccgacgcccgggctttgcccgggcggcctcagtgagcgagcgagcgcgcagagagggagtggccaa

SEQ ID NO: 42 - protein, 725 aa, Adeno-associated virus 5
MAADGYLPDWLEDTLSEGIRQWWKLKPGPPPPKPAERHKDDSRGLVLPGYKYLGPFNGLDKGEPVNEADAAALEHDKAYDRQLDSGDNPYLKYNHADAEFQERLKEDTSFGGNLGRAVFQAKKRVLEPFGLVEEGAKTAPTGKRIDDHFPKRKKARTEEDSKPSTSSDAEAGPSGSQQLQIPAQPASSLGADTMSAGGGGPLGDNNQGADGVGNASGDWHCDSTWMGDRVVTKSTRTWVLPSYNNHQYREIKSGSVDGSNANAYFGYSTPWGYFDFNRFHSHWSPRDWQRLINNYWGFRPRSLRVKIFNIQVKEVTVQDSTTTIANNLTSTVQVFTDDDYQLPYVVGNGTEGCLPAFPPQVFTLPQYGYATLNRDNTENPTERSSFFCLEYFPSKMLRTGNNFEFTYNFEEVPFHSSFAPSQNLFKLANPLVDQYLYRFVSTNNTGGVQFNKNLAGRYANTYKNWFPGPMGRTQGWNLGSGVNRASVSAFATTNRMELEGASYQVPPQPNGMTNNLQGSNTYALENTMIFNSQPANPGTTATYLEGNMLITSESETQPVNRVAYNVGGQMATNNQSSTTAPTTGTYNLQEIVPGSVWMERDVYLQGPIWAKIPETGAHFHPSPAMGGFGLKHPPPMMLIKNTPVPGNITSFSDVPVSSFITQYSTGQVTVEMEWELKKENSKRWNPEIQYTNNYNDPQFVDFAPDSTGEYRTTRPIGTRYLTRPL

SEQ ID NO: 43 - protein, 644 aa, Adeno-associated virus
  VARIANT 434: note = MOD_RES - Any amino acid
KAYDQQLKAGDNPYLRYNHADAEFQERLQEDTSFGGNLGRAVFQAKKRVLEPLGLVETPAKTAPGKKRPVDSPDSTSGIGKKGQQPAKKRLNFGQTGDSESVPDPQPIGEPPAGPSGLGSGTMAAGGGAPMADNNEGADGVGNASGNWHCDSTWLGDRVITTSTRTWALPTYNNHLYKQISSQSAGSTNDNVYFGYSTPWGYFDFNRFHCHFSPRDWQRLINNNWGFRPKKLNFKLFNIQVKEVTTNDGVTTIANNLTSTVQVFSDSEYQLPYVLGSAHQGCLPPFPADVFMIPQYGYLTLNNGSQSVGRSSFYCLEYFPSQMLRTGNNFTFSYTFEDVPFHSSYAHSQSLDRLMNPLIDQYLYYLARTQSNAGGTAGNRELQFYQGGPTTMAEQAKNWLPGPCFRQQRVSKTLDQNNNSNFAWTGATKYHLNXRNSLVNPGVAMATHKDDEERFFPSSGVLIFGKTGAANKTTLENVLMTNEEEIRPTNPVATEEYGIVSSNLQAASTAAQTQVVNNQGALPGMVWQNRDVYLQGPIWAKIPHTDGNFHPSPLMGGFGLKHPPPQILIKNTPVPANPPEVFTPAKFASFITQYSTGQVSVEIEWELQKENSKRWNPEIQYTSNFDKQTGVDFAVDSQGVYSEP

SEQ ID NO: 44 - DNA, 1933 bp, Adeno-associated virus
  source 1..1933: mol_type = unassigned DNA
caaggcctacgaccagcagctcaaagcgggtgacaatccgtacctgcggtataaccacgccgacgccgagtttcaggagtgtcttcaagaagatacgtcttttgggggcaacctcgggcgagcagtcttccaggccaaaaagcgggttctcgaacctcttggtctggttgagacgccagctaagacggcacctggaaagaagcgaccggtagactcgccagactccacctcgggcatcggcaagaaaggccagcagcccgcgaaaaagagactcaactttgggcagactggcgactcagagtcagtccccgaccctcaaccaatcggagaaccaccagcaggcccctctggtctgggatctggtacaatggttgcaggcggtggcgcaccaatggctgacaataacgagggcgccgacggagtgggtaatgcctcaggaaattggcattgcgattccacatggctgggcgacagagtcatcaccaccagcacccgaacctgggccctgcccacctacaacaaccacctctacaagcaaatctccagtcagtcagcagggagcaccaacgataacgtctatttcggctacagcaccccctgggggtattttgacttcaacagattccattgccacttctcaccacgtgactggcagcgacttatcaacaacaactggggattccggcccaagaagctcaacttcaagctcttcaacatccaggtcaaggaggtcacgacgaatgacggtgtcacaaccatcgctaataaccttaccagcacggttcaggtcttttcggactcggaatatcaactgccgtacgtcctcggctccgcgcaccagggctgcctgcctccgttcccggcagacgtgttcatgattccgcagtacggatacctgactctgaacaatggcagccaatcggtaggccgttcctccttctactgcctggagtactttccttctcagatgctgagaacgggcaacaacttcacctttagctacaccttcgaggacgtgcctttccacagcagctacgcgcacagccagagtctggaccggctgatgaatcccctcatcgaccagtacctgtactacttggccagaacacagagcaacgcaggaggtactgctggcaatcgggaactgcagttttatcagggcggacctaccaccatggccgaacaagcaaagaactggctgcccggaccttgcttccggcaacagagagtatccaagacgctggatcaaaataacaacagcaactttgcctggactggtgccacaaaataccatttaaatggaagaaattcattggttaatcccggtgtcgccatggcaacccacaaggacgacgaggaacgcttctccccttcgagcggagttctaatttttggcaaaactggagcagctaataaaactacattagaaaacgtgctcatgacaaatgaagaagaaattcgtcctaccaacccggtagctaccgaggaatacgggattgtaagcagcaacttgcaggcggctagcaccgcagcccagacacaagttgttaacaaccagggagccttacctggcatggtctggcagaaccgggacgtgtacctgcaaggtcccatttgggccaagattcctcacacggacggcaactttcacccgtctcctctaatgggtggctttggactgaaacacccgcctccccagatcctgatcaaaaacacgccggtacctgctaatcctccagaagtgtttactcctgccaagtttgcttccttcatcacgcagtacagcaccgggcaagtcagcgttgagatcgagtgggagctgcagaaagagaacagcaagcgctggaacccagagattcagtacacctccaactttgacaaacagactggagtggactttgctgttgacagccagggtgtttactctgagcct

SEQ ID NO: 45 - protein, 644 aa, Adeno-associated virus
KAYDQQLKAGDNPYLRYNHADAEFQECLQEDTSFGGNLGRAVFQAKKRVLEPLGLVETPAKTAPGKKRPVDSPDSTSGIGKKGQQPAKKRLNFGQTGDSESVPDPQPIGEPPAGPSGLGSGTMVAGGGAPMADNNEGADGVGNASGNWHCDSTWLGDRVITTSTRTWALPTYNNHLYKQISSQSAGSTNDNVYFGYSTPWGYFDFNRFHCHFSPRDWQRLINNNWGFRPKKLNFKLFNIQVKEVTTNDGVTTIANNLTSTVQVFSDSEYQLPYVLGSAHQGCLPPFPADVFMIPQYGYLTLNNGSQSVGRSSFYCLEYFPSQMLRTGNNFTFSYTFEDVPFHSSYAHSQSLDRLMNPLIDQYLYYLARTQSNAGGTAGNRELQFYQGGPTTMAEQAKNWLPGPCFRQQRVSKTLDQNNNSNFAWTGATKYHLNGRNSLVNPGVAMATHKDDEERFSPSSGVLIFGKTGAANKTTLENVLMTNEEEIRPTNPVATEEYGIVSSNLQAASTAAQTQVVNNQGALPGMVWQNRDVYLQGPIWAKIPHTDGNFHPSPLMGGFGLKHPPPQILIKNTPVPANPPEVFTPAKFASFITQYSTGQVSVEIEWELQKENSKRWNPEIQYTSNFDKQTGVDFAVDSQGVYSEP

SEQ ID NO: 46 - DNA, 1933 bp, Adeno-associated virus
  source 1..1933: mol_type = unassigned DNA
caaggcctacgaccagcagctcaaagcgggtgacaatccgtacctgcggtataaccacgccgacgccgagtttcaggagcgtcttcaagaagatacgtcttttgggggcaacctcgggcgagcagtcttccaggccaaaaagcgggttctcgaacctcttggtctggttgagacgccagctaagacggcacctggaaagaagcgaccggtagactcgccagactccacctcgggcatcggcaagaaaggccagcagcccgcgaaaaagagactcaactttgggcagactggcgactcagagccagtccccgaccctcaaccaatcggagaaccaccagcaggcccctctggtctgggatctggtacaatggctgcaggcggtggcgcaccaatggctgacaataacgagggcgccgacggagtgggtaatgcctcaggaaattggcattgcgattccacacggctgggcgacagagtcatcaccaccagcacccgaacctgggccctgcccacctacaacaaccacctctacaagcaaatctccagtcagtcagcagggagcaccaacgataacgtctatttcggctacagcaccccctgggggtattttgacttcaacagattccattgccacttctcaccacgtgactggcagcgacttatcaacaacaactggggattccggcccaagaagctcaacttcaagctcttcaacatccaggtcaaggaggtcacgacgaatgacggcgtcacaaccatcgctaataaccttaccagcacggttcaggtcttttcggactcggaatatcaactgccgtacgtcctcggctccgcgcaccagggctgcctgcctccgttcccggcagacgtgttcatgattccgcagtacggatacctgactctgaacaatggcagccaatcggtaggccgttcctccttctactgcctggagtactttccttctcagatgctgagaacgggcaacaacttcacctttagctacaccttcgaggacgtgcctttccacagcagctacgcgcacagccagagtctgggccggctgatgaatcccctcatcgaccagtacctgtactacttggccagaacacagagcaacgcaggaggtactgctggcaatcgggaactgcagttttatcagggcggacctaccaccatggccgaacaagcaaagaactggctgcccggaccttgcttccggcaacagagagtatccaagacgctggatcaaaataacaacagcaactttgcctggactggtgccacaaaataccatttaaatggaagaaattcattggttaatcccggtgtcgccatggcaacccacaaggacgacgaggaacgcttcttcccttcgagcggagttctaatttttggcaaaactggagcagctaataaaactacattagaaaacgtgctcatgacaaatgaagaagaaattcgtcctaccaacccggtagctaccgaggaatacgggattgtaagcagcaacttgcaggcggctagcaccgcagcccagacacaagttgttaacaaccagggagccttacctggcatggtctggcagaaccgggacgtgtacctgcaaggtcccatttgggccaagattcctcacacggacggcaactttcacccgtctcctctaatgggtggctttggactgaaacacccgcctccccagatcctgatcaaaaacacaccggtacctgctaatcctccagaagtgtttactcctgccaagtttgcttccttcatcacgcagtacagcaccgggcaagtcagcgttgagatcgaatgggagctgcagaaagagaacagcaagcgctggaacccagagattcagtacacctccaactttgacaaacagactggagtggactttgctgttgacagccagggtgtttactctgagcct

SEQ ID NO: 47 - protein, 644 aa, Adeno-associated virus
KAYDQQLKAGDNPYLRYNHADAEFQERLQEDTSFGGNLGRAVFQAKKRVLEPLGLVETPAKTAPGKKRPVDSPDSTSGIGKKGQQPAKKRLNFGQTGDSEPVPDPQPIGEPPAGPSGLGSGTMAAGGGAPMADNNEGADGVGNASGNWHCDSTRLGDRVITTSTRTWALPTYNNHLYKQISSQSAGSTNDNVYFGYSTPWGYFDFNRFHCHFSPRDWQRLINNNWGFRPKKLNFKLFNIQVKEVTTNDGVTTIANNLTSTVQVFSDSEYQLPYVLGSAHQGCLPPFPADVFMIPQYGYLTLNNGSQSVGRSSFYCLEYFPSQMLRTGNNFTFSYTFEDVPFHSSYAHSQSLGRLMNPLIDQYLYYLARTQSNAGGTAGNRELQFYQGGPTTMAEQAKNWLPGPCFRQQRVSKTLDQNNNSNFAWTGATKYHLNGRNSLVNPGVAMATHKDDEERFFPSSGVLIFGKTGAANKTTLENVLMTNEEEIRPTNPVATEEYGIVSSNLQAASTAAQTQVVNNQGALPGMVWQNRDVYLQGPIWAKIPHTDGNFHPSPLMGGFGLKHPPPQILIKNTPVPANPPEVFTPAKFASFITQYSTGQVSVEIEWELQKENSKRWNPEIQYTSNFDKQTGVDFAVDSQGVYSEP

SEQ ID NO: 48 - DNA, 1933 bp, Adeno-associated virus; identical to SEQ ID NO: 46
  source 1..1933: mol_type = unassigned DNA

SEQ ID NO: 49 - protein, 644 aa, Adeno-associated virus; identical to SEQ ID NO: 47

SEQ ID NO: 50 - DNA, 1933 bp, Adeno-associated virus
  source 1..1933: mol_type = unassigned DNA
caaggcctacgaccagcagctcaaagcgggtgacaatccgtacctgcggtataaccacgccgacgccgagtttcaggagcgtcttcaagaagatacgtcttttgggggcaacctcgggcgagcagtcttccaggccaaaaagcgggttctcgaacctcttggtctggttgagacgccagctaagacggcacctggaaagaagcgaccggtagactcgccagactccacctcgggcatcggcaagaaaggccagcagcccgcgaaaaagagactcaactttgggcagactggcgactcagagtcagtccccgaccctcaaccaatcggagaaccaccagcaggcccctctggtctgggatctggtacaatggctgcaggcggtggcgcaccaatggctgacaatagcgagggcgccgacggagtgggtaatgcctcaggaaattggcattgcgattccacatggctgggcgacagagtcatcaccaccagcacccgaacctgggccctgcccacctacaacaaccacctctacaagcaaatctccagtcagtcagcagggagcaccaacgataacgtctatttcggctacagcaccccctgggggtattttgacttcaacagattccattgccacttctcaccacgtgactggcagcgacttatcaacaacaactggggattccggcccaagaagctcaacttcaagctcttcaacatccaggtcaaggaggtcacgacgaatgacggtgtcacaaccatcgctaataaccttaccagcacggttcaggtcttttcggactcggaatatcaactgccgtacgtcctcggctccgcgcaccagggctgcctgcctccgttcccggcagacgtgttcatgattccgcagtacggatacctgactctgaacaatggcagccaatcggtaggccgttcctccttctactgcctggagtactttccttctcagatgctgagaacgggcaacaacttcacctttagctacaccttcgaggacgtgcctttccacagcagctacgcgcacagccagagtctggaccggctgatgaatcccctcatcgaccagtacctgtactacttggccagaacacagagcaacgcaggaggtactgctggcaatcgggaactgcagttttatcagggcggacctaccaccatggccgaacaagcaaagaactggctgcccggaccttgcttccggcaacagagagtatccaagacgctggatcaaaataacaacagcaactttgcctggactggtgccacaaaataccatttaaatggaagaaattcattggttaatcccggtgtcgccatggcaacccacaaggacgacgaggaacgcttcttcccttcgagcggagttctaatttttggcaaaactggagcagctaataaaactacattagaaaacgtgctcatgacaaatgaagaagaaattcgtcctaccaacccggtagctaccgaggaatacgggattgtaagcagcaacttgcaggcggctagcaccgcagcccagacacaagttgttaacaaccagggagccttacctggcatggtctggcagaaccgggacgtgtacctgcaaggtcccatttgggccaagattcctcacacggacggcaactttcacccgtctcctctaatgggtggctttggactgaaacacccgcctccccagatcctgatcaaaaacacaccggtacctgctaatcctccagaagtgtttactcctgccaagcttgcttccttcatcacgcagtacagcaccgggcaagtcagcgttgagatcgagtgggagctgcagaaagagaacagcaagcgctggaacccagagattcagtacacctccaactttgacaaacagactggagtggactttgctgttgacagccagggtgtttactctgagcct

SEQ ID NO: 51 - protein, 644 aa, Adeno-associated virus
KAYDQQLKAGDNPYLRYNHADAEFQERLQEDTSFGGNLGRAVFQAKKRVLEPLGLVETPAKTAPGKKRPVDSPDSTSGIGKKGQQPAKKRLNFGQTGDSESVPDPQPIGEPPAGPSGLGSGTMAAGGGAPMADNSEGADGVGNASGNWHCDSTWLGDRVITTSTRTWALPTYNNHLYKQISSQSAGSTNDNVYFGYSTPWGYFDFNRFHCHFSPRDWQRLINNNWGFRPKKLNFKLFNIQVKEVTTNDGVTTIANNLTSTVQVFSDSEYQLPYVLGSAHQGCLPPFPADVFMIPQYGYLTLNNGSQSVGRSSFYCLEYFPSQMLRTGNNFTFSYTFEDVPFHSSYAHSQSLDRLMNPLIDQYLYYLARTQSNAGGTAGNRELQFYQGGPTTMAEQAKNWLPGPCFRQQRVSKTLDQNNNSNFAWTGATKYHLNGRNSLVNPGVAMATHKDDEERFFPSSGVLIFGKTGAANKTTLENVLMTNEEEIRPTNPVATEEYGIVSSNLQAASTAAQTQVVNNQGALPGMVWQNRDVYLQGPIWAKIPHTDGNFHPSPLMGGFGLKHPPPQILIKNTPVPANPPEVFTPAKLASFITQYSTGQVSVEIEWELQKENSKRWNPEIQYTSNFDKQTGVDFAVDSQGVYSEP

SEQ ID NO: 52 - DNA, 1933 bp, Adeno-associated virus
  source 1..1933: mol_type = unassigned DNA
caaggcctacgaccagcagctcaaagcgggtgacaatccgtacctgcggtataaccacgccgacgccgagtttcaggagcgtcttcaagaagatacgtcttttgggggcaacctcgggcgagcagtcttccaggccaaaaagcgggttctcgaacctcttggtctggttgagacgccagctaagacggcacctggaaagaagcgaccggtagactcgccagactccacctcgggcatcggcaagaaaggccagcagcccgcgaaaaagagactcaactttgggcagactggcgactcagagtcagtccccgaccctcaaccaatcggagaaccaccagcaggcccctctggtctgggatctggtacaatggctgcaggcggtggcgcaccaatggctgacaataacgagggcgccgacggagtgggtaatgcctcaggaaattggcattgcgattccacatggctgggcgacagagtcatcaccaccagcacccgaacctgggccctgcccacctacaacaaccacctctacaagcaaatctccagtcagtcagcagggagcaccaacgataacgtctatttcggctacagcaccccctgggggtattttgacttcaacagattccattgccacttctcaccacgtgactggcagcgacttatcaacaacaactggggattccggcccaagaagctcaacttcaagctcttcaacatccaggtcaaggaggtcacgacgaatgacggcgtcacaaccatcgctaataaccttaccagcacggttcaggtcttttcggacccggaatatcaactgccgtacgtcctcggctccgcgcaccagggctgcctgcctccgttcccggcagacgtgttcatgattccgcagtacggatacctgactctgaacaatggcagccaatcggtaggccgttcctccttctactgcctggagtactttccttctcagatgctgagaacgggcaacaacttcacctttagctacaccttcgaggacgtgcctttccacagcagctacgcgcacagccagagtctggaccggctgatgaatcccctcatcgaccagtacctgtactacttggccagaacacagagcaacgcaggaggtactgctggcaatcgggaactgcagttttatcagggcggacctaccaccatggccgaacaagcaaagaactggctgcccggaccttgcttccggcaacagagagtatccaagacgctggatcaaaataacaacagcaactttgcctggactggtgccacaaaataccatttaaatggaagaaattcattggttaatcccggtgtcgccatggcaacccacaaggacgacgaggaacgcttcttcccttcgagcggagttctaatttttggcaaaactggagcagctaataaaactacattagaaaacgtgctcatgacaaatgaagaagaaattcgtcctaccaacccggtagctaccgaggaatacgggattgtaagcagcaacttgcaggcggctagcaccgcagcccagacacaagttgttaacaaccagggagccttacctggcatggtctggcagaaccgggacgtgtacctgcaaggtcccatttgggccaagattcctcacacggacggcaactttcacccgtctcctctaatgggtggctttggactgaaacacccgcctccccagatcctgatcaaaaacacaccggtacctgctaatcctccagaagtgtttactcctgccaagattgcttccttcatcacgcagtacagcaccgggcaagtcagcgttgagatcgagtgggagctgcagaaagagaacagcaagcgctggaacccagagattcagtacacctccaactttgacaaacagactggagtggactttgctgttgacagccagggtgtttactctgagcct

SEQ ID NO: 53 - protein, 644 aa, Adeno-associated virus
KAYDQQLKAGDNPYLRYNHADAEFQERLQEDTSFGGNLGRAVFQAKKRVLEPLGLVETPAKTAPGKKRPVDSPDSTSGIGKKGQQPAKKRLNFGQTGDSESVPDPQPIGEPPAGPSGLGSGTMAAGGGAPMADNNEGADGVGNASGNWHCDSTWLGDRVITTSTRTWALPTYNNHLYKQISSQSAGSTNDNVYFGYSTPWGYFDFNRFHCHFSPRDWQRLINNNWGFRPKKLNFKLFNIQVKEVTTNDGVTTIANNLTSTVQVFSDPEYQLPYVLGSAHQGCLPPFPADVFMIPQYGYLTLNNGSQSVGRSSFYCLEYFPSQMLRTGNNFTFSYTFEDVPFHSSYAHSQSLDRLMNPLIDQYLYYLARTQSNAGGTAGNRELQFYQGGPTTMAEQAKNWLPGPCFRQQRVSKTLDQNNNSNFAWTGATKYHLNGRNSLVNPGVAMATHKDDEERFFPSSGVLIFGKTGAANKTTLENVLMTNEEEIRPTNPVATEEYGIVSSNLQAASTAAQTQVVNNQGALPGMVWQNRDVYLQGPIWAKIPHTDGNFHPSPLMGGFGLKHPPPQILIKNTPVPANPPEVFTPAKIASFITQYSTGQVSVEIEWELQKENSKRWNPEIQYTSNFDKQTGVDFAVDSQGVYSEP

SEQ ID NO: 54 - protein, 738 aa, Adeno-associated virus
MAADGYLPDWLEDNLSEGIREWWALKPGAPKPKANQQKQDDGRGLVLPGYKYLGPFNGLDKGEPVNAADAAALEHDKAYDQQLKAGDNPYLRYNHADAEFQERLQEDTSFGGNLGRAVFQAKKRVLEPLGLVEEGAKTAPGKKRPVEPSPQRSPDSTTGIGKKGQQPAKKRLNFGQTGDSESVPDPQPIGEPPAGPSGLGSGTMAAGGGAPMADNNEGADGVGSSSGNWHCDSTWLGDRVITTSTRTWALPTYNNHLYKQISNGTSGGSTNDNTYFGYSTPWGYFDFNRFHCHFSPRDWQRLINNNWGFRPKRLNFKLFNIQVKEVTQNEGTKTIANNLTSTIQVFTDSEYQLPYVLGSARQGCLPPFPADVFMIPQYGYLTLNNGSQAVGRSSFYCLEYFPSQMLRTGNNFEFSYQFEDVPFHSSYAHSQSLDRLMNPLIDQYLYYLSRTQSTGGTAGTQQLLFSQAGPNNMSAQAKNWLPGPCYRQQRVSTTLSQNNNSNFAWTGATKYHLNGRDSLVNPGVAMATHKDDEERFFPSSGVLMFGKQGAGKGNVDYSSVMLTSEEEIKTTNPVATEQYGVVADNLQQQNAAPIVGAVNSQGALPGMVWQNRDVYLQGPIWAKIPHTDGNFHPSPLMGGFGLKHPPPQILIKNTPVPADPPTTFSQAKLASFITQYSTGQVSVEIEWELQKENSKRWNPEIQYTSNYYKSTNVDFAVNTDGTYSEPRPIGTRYLTRNL

SEQ ID NO: 55 - DNA, 3121 bp, Adeno-associated virus
  source 1..3121: mol_type = unassigned DNA
gaattcgcccttctacggctgcgtcaactggaccaatgagaactttcccttcaacgactgtgtcgacaagatggtgatctggtgggaggaggggaagatgaccgccaaggtcgtggagtcggccaaagccattctcggaggaagcaaggtgcgcgtggaccagaaatgcaagtcctcggcccagatagacccgactcccgtgatcgtcacctccaacaccaacatgtgcgccgtgattgacgggaactcaacgaccttcgaacaccagcagccgttgcaagaccggatgttcaaatttgaactcacccgccgtctggatcatgactttgggaaggtcaccaagcaggaagtcaaagactttttccggtgggcaaaggatcacgtggttgaggtggagcacgaattctacgtcaaaaagggtggagccaagaaaagacccgcccccagtgacgcagatataagtgagcccaaacgggtgcgcgagtcagttgcgcagccatcgacgtcagacgcggaagcttcgatcaactacgcagacaggtaccaaaacaaatgttctcgtcacgcgggcatgaatctgatgctgtttccctgcagacaatgcgagagaatgaatcagaattcaaatatctgcttcactcacggacagaaagactgtttagagtgctttcccgtgtcagaatctcaacccgtttctgtcgtcaaaaaggcgtatcagaaactgtgctacattcatcatatcatgggaaaggtgccagacgcttgcactgcctgcgatctggtcgatgtggatttggatgactgcatctttgaacaataaatgatttaaatcaggtatggctgccgatggttatcttccagattggctcgaggacaacctctctgagggcattcgcgagtggtgggcgctgaaacctggagccccgaagcccaaagccaaccagcaaaagcaggacggcggccggggtctggtgcttcctggctacaagtacctcggacccttcaacggactcgacaagggggagcccgtcaacgcggcggacgcagcggccctcgagcacgacaaggcctacgaccagcagctcaaagcgggtgacaatccgtacctgcggtataaccacgccgacgccgagtttcaggagcgtctgcaagaagatacgtcttttgggggcaacctcgggcgagcagtcttccaggccaagaagcgggttctcgaacctctcggtctggttgaggaaggcgctaagacggctcctggaaagaagagaccggtagagccatcaccccagcgttctccagactcctctacgggcatcggcaagaaaggccagcagcccgcgaaaaagagactcaactttgggcagactggcgactcagagtcagtgcccgaccctcaaccaatcggagaaccccccgcaggcccctctggtctgggatctggtacaatggctgcaggcggtggcgctccaatggcagacaataacgaaggcgccgacggagtgggtagttcctcaggaaattggcattgcgattccacatggctgggcgactgagtcatcaccaccagcacccgaacctgggccctccccacctacaacaaccacctctacaagcaaatctccaacgggacttcgggaggaagcaccaacgacaacacctacttcggctacagcaccccctgggggtattttgactttaacagattccactgccacttctcaccacgtgactggcagcgactcatcaacaacaactggggattccggcccaagagactcaacttcaagctcttcaacatccaggtcaaggaggtcacgcagaatgaaggcaccaagaccatcgccaataaccttaccagcacgattcaggtctttacggactcggaataccagctcccgtacgtcctcggctctgcgcaccagggctgcctgcctccgttcccggcggacgtcttcatgattcctcagtacgggtacctgactctgaacaatggcagtcaggccgtgggccgttcctccttctactgcctggagtactttccttctcaaatgctgagaacgggcaacaactttgagttcagctaccagtttgaggacgtgccttttcacagcagctacgcgcacagccaaagcctggaccggctgatgaaccccctcatcgaccagtacctgtactacctgtctcggactcagtccacgggaggtaccgcaggaactcagcagttgctattttctcaggccgggcctaataacatgtcggctcaggccaaaaactggctacccgggccctgctaccggcagtaacgcgtctccacgacactgtcgcaaaataacaacagcaactttgtctggaccggtgccaccaagtatcatctgaatggcagagactctctggtagatcccggtgtcgctatggcaacccacaaggacgacgaagagcgattttttccgtccagcggagtcataatgtttgggaaacagggagctggaaaagacaacgtggactatagcagcgtcatgctaaccagtgaggaagaaattaaaaccaccaacccagtggccacagaacagtacggcgtggtggccgataacctgcaacagcaaaacgccgctcctattgtaggggccgtcaacagtcaaggagccttacctggcatggtctggcagaaccgggacgtgtacctgcagggtcctacctgggccaagattcctcacacggacggaaactttcatccctcgccgctgatgggaggctttggactgaaacacccgcctcctcagatcctgattaagaatacacctgttcccgcggatcctccaactaccttcagtcaagctaagctggcgtcgttcatcacgcagtacagcaccggacaggtcagcgtggaaattgaatgggagctgcaggaagaaaacagcaaacgctggaacccagagattcaatacacttccaactactacaaatctacaaatgtggactttgctgttaacacagatggcacttattctgagcctcgccccatcggcacccgttacctcacccgtaatctgtaattgcttgttaatcaataaaccggttgattcgtttcagttgaactttggtctctgcgaagggcgaattc

SEQ ID NO: 56 - protein, 738 aa, Adeno-associated virus
MAADGYLPDWLEDNLSEGIREWWALKPGAPKPKANQQKQDDGRGLVLPGYKYLGPFNGLDKGEPVNAADAAALEHDKAYDQQLKAGDNPYLRYNHADAEFQERLQEDTSFGGNLGRAVFQAKKRVLEPLGLVEEGAKTAPGKKRPVEPSPQRSPDSSTGIGKKGQQPAKKRLNFGQTGDSESVPDPQPIGEPPAGPSGLGSGTMAAGGGAPMADNNEGADGVGSSSGNWHCDSTWLGDGVITTSTRTWALPTYNNHLYKQISNGTSGGSTNDNTYFGYSTPWGYFDFNRFHCHFSPRDWQRLINNNWGFRPKSLNFKLFNIQVKEVTQNEGTKTIANNLTSTIQVFTDSEYQLPYVLGSAHQGCLPPFPADVFMIPQYGYLTLNNGSQAVGRSSFYCLEYFPSQMLRTGNNFEFSYQFEDVPFHSSYAHSQSLDRLMNPLIDQYLYYLSRTQSTGGTAGTQQLLFSQAGPNNMSAQAKNWLPGPCYRQQRVSTTLSQNDNSNFAWTGATKYHLNGRDSLVNPGVAMATHKDDEERFFPSSGVLMFGKQGAGKDNVDYSSVMLTSEEEIKTTNPVATEQYGVVADNLQQQNAAPIVGAVNSQGALPGMVWQNRDVYLQGPIWAKIPHTDGNFHPSPLMGGFGLKHPPPQILIKNTPVPADPPTTFSQAKLASFITQYSTGQVSVEIEWELQKENSKRWNPEIQYTSNYYKSTNVDFAVNTDGTYSEPRPIGTRYLTRNL

SEQ ID NO: 57 - DNA, 3121 bp, Adeno-associated virus
  source 1..3121: mol_type = unassigned DNA
gaattcgcccttcgcgagaccaaagttcaactgaaacgaatcaaccggtttattgattaacaagcaattacagattacgggtgaggtaacgggtgccgatggggcgaggctcagaataagtgccatctgtgttaacagcaaagtccacatttgtagatttgtagtagttggaagtgtattgaatctctgggttccagcgtttgctgttttctttctgcagctcccattcaatttccacgctgacctgtccggtgctgtactgcgtgatgaacgacgccagcttagcttgactgaaggtagttggaggatccgcgggaacaggtgtattcttaatcaggatctgaggaggcgggtgtttcagtccaaagcctcccatcagcggcgagggatgaaagtttccgtccgtgtgaggaatcttggcccagataggaccctgcaggtacacgtcccggttctgccagaccatgccaggtaaggctccttgactgttgacggcccctacaataggagcggcgttttgctgttgcaggttatcggccaccacgccgtactgttctgtggccactgggttggtggttttaatttcttcctcactggttagcataacgctgctatagtccacgttgtcttttccagctccctgtttcccaaacattaagactccgctggacggaaaaaatcgctcttcgtcgtccttgtgggttgccatagcgacaccgggatttaccagagagtctctgccattcagatgatacttggtggcaccggtccaggcaaagttgctgttgtcattttgcgacagtgtcgtggagacgcgttgctgccggtagcagggcccgggtagccagtttttggcctgagccgacatgttattaggcccggcctgagaaaatagcaactgctgagttcctgcggtacctcccgtggactgagtccgagacaggtagtacaggtactggtcgatgagggggttcatcagccggtccaggctttggctgtgcgcgtagctgctgtgaaaaggcacgtcctcaaactggtagctgaactcaaagttgttgcccgttctcagcatttgagaaggaaagtactccaggcagtagaaggaggaacggcccacggcctgactgccattgttcagagtcaggtacccgtactgaggaatcatgaagacgtccgccgggaacggaggcaggcagccctggtgcgcagagccgaggacgtacgggagctggtattccgagtccgtaaagacctgaatcgtgctggtaaggttattggcgatggtcttggtgccttcattctgcgtgacctccttgacctggatgttgaagagcttgaagttgaggctcttgggccggaatccccagttgttgttgatgagtcgctgccagtcacgtggtgagaagtggcagtggaatctgttaaagtcaaaatacccccagggggtgctgtagccgaagtaggtgttgtcgttggtgcttcctcccgaagtcccgttggagatttgcttgtagaggtggttgttgtaggtggggagggcccaggttcgggtgctggtggtgatgactccgtcgcccagccatgtggaatcgcaatgccaatttcctgaggaactacccactccgtcggcgccttcgttattgtctgccattggagcgccaccgcctgcagccattgtaccagatcccagaccagaggggcctgcggggggttctccgattggttgagggtcgggcactgactctgagtcgccagtctgcccaaagttgagtctctttttcgcgggctgctggcctttcttgccgatgcccgtagaggagtctggagaacgctggggtgatggctctaccggtctcttctttccaggagccgtcttagcgccttcctcaaccagaccgagaggttcgagaacccgcttcttggcctggaagactgctcgcccgaggttgcccccaaaagacgtatcttcttgcagacgctcctgaaactcggcgtcggcgtggttataccgcaggtacggattgtcacccgctttgagctgctggtcgtaggccttgtcgtgctcgagggccgctgcgtccgccgcgttgacgggctcccccttgtcgagtccgttgaagggtccgaggtacttgtagccaggaagcaccagaccccggccgtcgtcctgcttttgctggttggctttgggcttcggggctccaggtttcagcgcccaccactcgcgaatgccctcagagaggttgtcctcgagccaatctggaagataaccatcggcagccatacctgatttaaatcatttattgttcaaagatgcagtcatccaaatccacattgaccagatcgcaggcagtgcaagcgtctggcacctttcccatgatatgatgaatgtagcacagtttctgatacgcctttttgacgacagaaacgggttgagattctgacacgggaaagcactctaaacagtctttctgtccgtgagtgaagcagatatttgaattctgattcattctctcgcattgtctgcagggaaacagcatcagattcatgcccacgtgacgagaacatttgttttggtacctgtctgcgtagttgatcgaagcttccgcgtctgacgtcgatggctgcgcaactgactcgcgcacccgtttgggctcacttatatctgcgtcactgggggcgggtcttttcttggctccaccctttttgacgtagaattcatgctccacctcaaccacgtgatcctttgcccaccggaaaaagtctttgacttcctgcttggtgaccttcccaaagtcatgatccagacggcgggtgagttcaaatttgaacatccggtcttgcaacggctgctggtgttcgaaggtcgttgagttcccgtcaatcacggcgcacatgttggtgttggaggtgacgatcacgggagtcgggtctatctgggccgaggacttgcatttctggtccacgcgcaccttgcttcctccgagaatggctttggccgactccacgaccttggcggtcatcttcccctcctcccaccagatcaccatcttgtcgacacagtcgttgaagggaaagttctcattggtccagttgacgcagccgtagaaagggcgaattc

SEQ ID NO: 58 - DNA, 2211 bp, Adeno-associated virus
  source 1..2211: mol_type = unassigned DNA
atggctgctgacggttatcttccagattggctcgaggacaacctttctgaaggcattcgtgagtggtgggctctgaaacctggagtccctcaacccaaagcgaaccaacaacaccaggacaaccgtcggggtcttgtgcttccgggttacaaatacctcggacccggtaacggactcgacaaaggagagccggtcaacgaggcggacgcggcagccctcgaacacgacaaagcttacgaccagcagctcaaggccggtgacaacccgtacctcaagtacaaccacgccgacgccgagtttcaggagcgtcttcaagaagatacgtcttttgggggcaaccttggcagagcagtcttccaggccaaaaagaggatccttgagcctcttggtctggttgaggaagcagctaaaacggctcctggaaagaagggggctgtagatcagtctcctcaggaaccggactcatcatctggtgttggcaaatcgggcaaacagcctgccagaaaaagactaaatttcggtcagactggagactcagagtcagtcccagaccctcaacctctcggagaaccaccagcagcccccacaagtttgggatctaatacaatggcttcaggcggtggcgcaccaatggcagacaataacgagggtgccgatggagtgggtaattcctcaggaaattggcattgcgattcccaatggctgggcgacagagtcatcaccaccagcaccagaacctgggccctgcccacttacaacaaccatctctacaagcaaatctccagccaatcaggagcttcaaacgacaaccactactttggctacagcaccccttgggggtattttgactttaacagattccactgccacttctcaccacgtgactggcagcgactcattaacaacaactggggattccggcccaagaaactcagcttcaagctcttcaacatccaagttagaggggtcacgcagaacgatggcacgacgactattgccaataaccttaccagcacggttcaagtgtttacggactcggagtatcagctcccgtacgtgctcgggtcggcgcaccaaggctgtctcccgccgtttccagcggacgtcttcatggtccctcagtatggatacctcaccctgaacaacggaagtcaagcggtgggacgctcatccttttactgcctggagtacttcccttcgcagatgctaaggactggaaataacttccaattcagctataccttcgaggatgtaccttttcacagcagctacgctcacagccagagtttggatcgcttgatgaatcctcttattgatcagtatctgtactacctgaacagaacgcaaggaacaacctctggaacaaccaaccaatcacggctgctttttagccaggctgggcctcagtctatgtctttgcaggccagaaattggctacctgggccctgctaccggcaacagagactttcaaagactgctaacgacaacaacaacagtaactttccttggacagcggccagcaaatatcatctcaatggccgcgactcgctggtgaatccaggaccagctatggccagtcacaaggacgatgaagaaaaatttttccctatgcacggcaatctaatatttggcaaagaagggacaacggcaagtaacgcagaattagataatgtaatgattacggatgaagaagagattcgtaccaccaatcctgtggcaacagagcagtatggaactgtggcaaataacttgcagagctcaaatacagctcccacgactggaactgtcaatcatcagggggccttacctggcatggtgtggcaagatcgtgacgtgtaccttcaaggacctatctgggcaaagattcctcacacggatggacactttcatccttctcctctgatgggaggctttggactgaaacatccgcctcctcaaatcatgatcaaaaatactccggtaccggcaaatcctccgacgactttcagcccggccaagtttgcttcatttatcactcagtactccactggacaggtcagcgtggaaattgagtgggagctacagaaagaaaacagcaaacgttggaatccagagattcagtacacttccaactacaacaagtctgttaatgtggactttactgtagacactaatggtgtttatagtgaacctcgccctattggaacccggtatctcacacgaaacttgtga

SEQ ID NO: 59 - protein, 736 aa, Adeno-associated virus 3
MAADGYLPDWLEDNLSEGIREWWALKPGVPQPKANQQHQDNRRGLVLPGYKYLGPGNGLDKGEPVNEADAAALEHDKAYDQQLKAGDNPYLKYNHADAEFQERLQEDTSFGGNLGRAVFQAKKRILEPLGLVEEAAKTAPGKKGAVDQSPQEPDSSSGVGKSGKQPARKRLNFGQTGDSESVPDPQPLGEPPAAPTSLGSNTMASGGGAPMADNNEGADGVGNSSGNWHCDSQWLGDRVITTSTRTWALPTYNNHLYKQISSQSGASNDNHYFGYSTPWGYFDFNRFHCHFSPRDWQRLINNNWGFRPKKLSFKLFNIQVRGVTQNDGTTTIANNLTSTVQVFTDSEYQLPYVLGSAHQGCLPPFPADVFMVPQYGYLTLNNGSQAVGRSSFYCLEYFPSQMLRTGNNFQFSYTFEDVPFHSSYAHSQSLDRLMNPLIDQYLYYLNRTQGTTSGTTNQSRLLFSQAGPQSMSLQARNWLPGPCYRQQRLSKTANDNNNSNFPWTAASKYHLNGRDSLVNPGPAMASHKDDEEKFFPMHGNLIFGKEGTTASNAELDNVMITDEEEIRTTNPVATEQYGTVANNLQSSNTAPTTGTVNHQGALPGMVWQDRDVYLQGPIWAKIPHTDGHFHPSPLMGGFGLKHPPPQIMIKNTPVPANPPTTFSPAKFASFITQYSTGQVSVEIEWELQKENSKRWNPEIQYTSNYNKSVNVDFTVDTNGVYSEPRPIGTRYLTRNL

SEQ ID NO: 60 - DNA, 4726 bp, Adeno-associated virus 3
  source 1..4726: mol_type = unassigned DNA
ttggccactccctctatgcgcactcgctcgctcggtggggcctggcgaccaaaggtcgccagacggacgtgctttgcacgtccggccccaccgagcgagcgagtgcgcatagagggagtggccaactccatcactagaggtatggcagtgacgtaacgcgaagcgcgcgaagcgagaccacgcctaccagctgcgtcagcagtcaggtgacccttttgcgacagtttgcgacaccacgtggccgctgagggtatatattctcgagtgagcgaaccaggagctccattttgaccgcgaaatttgaacgagcagcagccatgccggggttctacgagattgtcctgaaggtcccgagtgacctggacgagcgcctgccgggcatttctaactcgtttgttaactgggtggccgagaaggaatgggacgtgccgccggattctgacatggatccgaatctgattgagcaggcacccctgaccgtggccgaaaagcttcagcgcgagttcctggtggagtggcgccgcgtgagtaaggccccggaggccctcttttttgtccagttcgaaaagggggagacctacttccacctgcacgtgctgattgagaccatcggggtcaaatccatggtggtcggccgctacgtgagccagattaaagagaagctggtgacccgcatctaccgcggggtcgagccgcagcttccgaactggttcgcggtgaccaaaacgcgaaatggcgccgggggcgggaacaaggtggtggacgactgctacatccccaactacctgctccccaagacccagcccgagctccagtgggcgtggactaacatggaccagtatttaagcgcctgtttgaatctcgcggagcgtaaacggctggtggcgcagcatctgacgcacgtgtcgcagacgcaggagcagaacaaagagaatcagaaccccaattctgacgcgccggtcatcaggtcaaaaacctcagccaggtacatggagctggtcgggtggctggtggaccgcgggatcacgtcagaaaagcaatggattcaggaggaccaggcctcgtacatctccttcaacgccgcctccaactcgcggtcccagatcaaggccgcgctggacaatgcctccaagatcatgagcctgacaaagacggctccggactacctggtgggcagcaacccgccggaggacattaccaaaaatcggatctaccaaatcctggagctgaacgggtacgatccgcagtacgcggcctccgtcttcctgggctgggcgcaaaagaagttcgggaagaggaacaccatctggctctttgggccggccacgacgggtaaaaccaacatcgcggaagccatcgcccacgccgtgcccttctacggctgcgtaaactggaccaatgagaactttcccttcaacgattgcgtcgacaagatggtgatctggtgggaggagggcaagatgacggccaaggtcgtggagagcgccaaggccattctgggcggaagcaaggtgcgcgtggaccaaaagtgcaagtcatcggcccagatcgaacccactcccgtgatcgtcacctccaacaccaacatgtgcgccgtgattgacgggaacagcaccaccttcgagcatcagcagccgctgcaggaccggatgtttgaatttgaacttacccgccgtttggaccatgactttgggaaggtcaccaaacaggaagtaaaggactttttccggtgggcttccgatcacgtgactgacgtggctcatgagttctacgtcagaaagggtggagctaagaaacgccccgcctccaatgacgcggatgtaagcgagccaaaacgggagtgcacgtcacttgcgcagccgacaacgtcagacgcggaagcaccggcggactacgcggacaggtaccaaaacaaatgttctcgtcacgtgggcatgaatctgatgctttttccctgtaaaacatgcgagagaatgaatcaaatttccaatgtctgttttacgcatggtcaaagagactgtggggaatgcttccctggaatgtcagaatctcaacccgtttctgtcgtcaaaaagaagacttatcagaaactgtgtccaattcatcatatcctgggaagggcacccgagattgcctgttcggcctgcgatttggccaatgtggacttggatgactgtgtttctgagcaataaatgacttaaaccaggtatggctgctgacggttatcttccagattggctcgaggacaacctttctgaaggcattcgtgagtggtgggctctgaaacctggagtccctcaacccaaagcgaaccaacaacaccaggacaaccgtcggggtcttgtgcttccgggttacaaatacctcggacccggtaacggactcgacaaaggagagccggtcaacgaggcggacgcggcagccctcgaacacgacaaagcttacgaccagcagctcaaggccggtgacaacccgtacctcaagtacaaccacgccgacgccgagtttcaggagcgtcttcaagaagatacgtcttttgggggcaaccttggcagagcagtcttccaggccaaaaagaggatccttgagcctcttggtctggttgaggaagcagctaaaacggctcctggaaagaagggggctgtagatcagtctcctcaggaaccggactcatcatctggtgttggcaaatcgggcaaacagcctgccagaaaaagactaaatttcggtcagactggagactcagagtcagtcccagaccctcaacctctcggagaaccaccagcagcccccacaagtttgggatctaatacaatggcttcaggcggtggcgcaccaatggcagacaataacgagggtgccgatggagtgggtaattcctcaggaaattggcattgcgattcccaatggctgggcgacagagtcatcaccaccagcaccagaacctgggccctgcccacttacaacaaccatctctacaagcaaatctccagccaatcaggagcttcaaacgacaaccactactttggctacagcaccccttgggggtattttgactttaacagattccactgccacttctcaccacgtgactggcagcgactcattaacaacaactggggattccggcccaagaaactcagcttcaagctcttcaacatccaagttagaggggtcacgcagaacgatggcacgacgactattgccaataaccttaccagcacggttcaagtgtttacggactcggagtatcagctcccgtacgtgctcgggtcggcgcaccaaggctgtctcccgccgtttccagcggacgtcttcatggtccctcagtatggatacctcaccctgaacaacggaagtcaagcggtgggacgctcatccttttactgcctggagtacttcccttcgcagatgctaaggactggaaataacttccaattcagctataccttcgaggatgtaccttttcacagcagctacgctcacagccagagtttggatcgcttgatgaatcctcttattgatcagtatctgtactacctgaacagaacgcaaggaacaacctctggaacaaccaaccaatcacggctgctttttagccaggctgggcctcagtctatgtctttgcaggccagaaattggctacctgggccctgctaccggcaacagagactttcaaagactgctaacgacaacaacaacagtaactttccttggacagcggccagcaaatatcatctcaatggccgcgactcgctggtgaatccaggaccagctatggccagtcacaaggacgatgaagaaaaatttttccctatgcacggcaatctaatatttggcaaagaagggacaacggcaagtaacgcagaattagataatgtaatgattacggatgaagaagagattcgtaccaccaatcctgtggcaacagagcagtatggaactgtggcaaataacttgcagagctcaaatacagctcccacgactggaactgtcaatcatcagggggccttacctggcatggtgtggcaagatcgtgacgtgtaccttcaaggacctatctgggcaaagattcctcacacggatggacactttcatccttctcctctgatgggaggctttggactgaaacatccgcctcctcaaatcatgatcaaaaatactccggtaccggcaaatcctccgacgactttcagcccggccaagtttgcttcatttatcactcagtactccactggacaggtcagcgtggaaattgagtgggagctacagaaagaaaacagcaaacgttggaatccagagattcagtacacttccaactacaacaagtctgttaatgtggactttactgtagacactaatggtgtttatagtgaacctcgccctattggaacccggtatctcacacgaaacttgtgaatcctggttaatcaataaaccgtttaattcgtttcagttgaactttggctcttgtgcacttctttatctttatcttgtttccatggctactgcgtagataagcagcggcctgcggcgcttgcgcttcgcggtttacaactgctggttaatatttaactctcgccatacctctagtgatggagttggccactccctctatgcgcactcgctcgctcggtggggcctggcgaccaaaggtcgccagacggacgtgctttgcacgtccggccccaccgagcgagcgagtgcgcatagagggagtggccaa

SEQ ID NO: 61 - protein, 737 aa, Adeno-associated virus
MAADGYLPDWLEDNLSEGIREWWDLKPGAPKPKANQQKQDNGRGLVLPGYKYLGPFNGLDKGEPVNAADAAALEHDKAYDQQLNAGDNPYLRYNHADAEFQERLQEDTSFGGNLGRAVFQAKKRVLEPLGLVEEGAKTAPAKKRPVEPSPQRSPDSSTGIGKKGQQPARKRLNFGQTGDSESVPDPQPLGEPPAAPSSVGSGTVAAGGGAPMADNNEGADGVGNASGNWHCDSTWLGDRVITTSTRTWALPTYNNHLYEQISSETAGSTNDNTYFGYSTPWGYFDFNRFHCHFSPRDWQRLINNNWGFRPKKLRFKLFNIQVKEVTTNDGVTTIANNLTSTIQVFSDSEYQLPYVLGSAHQGCLPPFPADVFMIPQYGYLTLNNGSQSVGRSSFYCLEYFPSQMLRTGNNFEFSYSFEDVPFHSSYAHSQSLDRLMNPLIDQYLYYLARTQSDPGGTAGNRELQFYQGGPSTMAEQAKNWLPGPCFRQQRVSKTLDQNNNSNFAWTGATKYHLNGRNSLVNPGVAMATHKDDEDRFFPSSGVLIFGKTGATNKTTLENVLMTNEEEIRPTNPVATEEYGIVSSNLQAANTAAQTQVVNNQGALPGMVWQNRDVYLQGPIWAKIPHTDGNFHPSPLMGGFGLKHPPPQILIKNTPVPANPPEVFTPAKFASFITQYSTGQVSVEIEWELQKENSKRWDPEIQYTSNFEKQTGVDFAVDSQGVYSEPRPIGTRYLTRNL

SEQ ID NO: 62 - DNA, 2211 bp, Adeno-associated virus
  source 1..2211: mol_type = unassigned DNA
atggctgctgacggttatcttccagattggctcgaggacaacctttctgaaggcattcgtgagtggtgggctctgaaacctggagtccctcaacccaaagcgaaccaacaacaccaggacaaccgtcggggtcttgtgcttccgggttacaaatacctcggacccggtaacggactcgacaaaggagagccggtcaacgaggcggacgcggcagccctcgaacacgacaaagcttacgaccagcagctcaaggccggtgacaacccgtacctcaagtacaaccacgccgacgccgagtttcaggagcgtcttcaagaagatacgtcttttgggggcaaccttggcagagcagtcttccaggccaaaaagaggatccttgagcctcttggtctggttgaggaagcagctaaaacggctcctggaaagaagggggctgtagatcagtctcctcaggaaccggactcatcatctggtgttggcaaatcgggcaaacagcctgccagaaaaagactaaatttcggtcagactggagactcagagtcagtcccagaccctcaacctctcggagaaccaccagcagcccccacaagtttgggatctaatacaatggcttcaggcggtggcgcaccaatggcagacaataacgagggtgccgatggagtgggtaattcctcaggaaattggcattgcgattcccaatggctgggcgacagagtcatcaccaccagcaccagaacctgggccctgcccacttacaacaaccatctctacaagcaaatctccagccaatcaggagcttcaaacgacaaccactactttggctacagcaccccttgggggtattttgactttaacagattccactgccacttctcaccacgtgactggcagcgactcattaacaacaactggggattccggcccaagaaactcagcttcaagctcttcaacatccaagttagaggggtcacgcagaacgatggcacgacgactattgccaataaccttaccagcacggttcaagtgtttacggactcggagtatcagctcccgtacgtgctcgggtcggcgcaccaaggctgtctcccgccgtttccagcggacgtcttcatggtccctcagtatggatacctcaccctgaacaacggaagtcaagcggtgggacgctcatccttttactgcctggagtacttcccttcgcagatgctaaggactggaaataacttccaattcagctataccttcgaggatgtaccttttcacagcagctacgctcacagccagagtttggatcgcttgatgaatcctcttattgatcagtatctgtactacctgaacagaacgcaaggaacaacctctggaacaaccaaccaatcacggctgctttttagccaggctgggcctcagtctatgtctttgcaggccagaaattggctacctgggccctgctaccggcaacagagactttcaaagactgctaacgacaacaacaacagtaactttccttggacagcggccagcaaatatcatctcaatggccgcgactcgctggtgaatccaggaccagctatggccagtcacaaggacgatgaagaaaaatttttccctatgcacggcaatctaatatttggcaaagaagggacaacggcaagtaacgcagaattagataatgtaatgattacggatgaagaagagattcgtaccaccaatcctgtggcaacagagcagtatggaactgtggcaaataacttgcagagctcaaatacagctcccacgactggaactgtcaatcatcagggggccttacctggcatggtgtggcaagatcgtgacgtgtaccttcaaggacctatctgggcaaagattcctcacacggatggacactttcatccttctcctctgatgggaggctttggactgaaacatccgcctcctcaaatcatgatcaaaaatactccggtaccggcaaatcctccgacgactttcagcccggccaagtttgcttcatttatcactcagtactccactggacaggtcagcgtggaaattgagtgggagctacagaaagaaaacagcaaacgttggaatccagagattcagtacacttccaactacaacaagtctgttaatgtggactttactgtagacactaatggtgtttatagtgaacctcgccctattggaacccggtatctcacacgaaacttgtaa

SEQ ID NO: 63 - protein, 736 aa, Adeno-associated virus; identical to SEQ ID NO: 59

SEQ ID NO: 64 - protein, 736 aa, Adeno-associated virus 3; identical to SEQ ID NO: 59
  source 1..736: note = Adeno-associated virus 3A

SEQ ID NO: 65 - protein, 624 aa, Adeno-associated virus 3
  source 1..624: note = Adeno-associated virus 3A
MPGFYEIVLKVPSDLDERLPGISNSFVNWVAEKEWDVPPDSDMDPNLIEQAPLTVAEKLQREFLVEWRRVSKAPEALFFVQFEKGETYFHLHVLIETIGVKSMVVGRYVSQIKEKLVTRIYRGVEPQLPNWFAVTKTRNGAGGGNKVVDDCYIPNYLLPKTQPELQWAWTNMDQYLSACLNLAERKRLVAQHLTHVSQTQEQNKENQNPNSDAPVIRSKTSARYMELVGWLVDRGITSEKQWIQEDQASYISFNAASNSRSQIKAALDNASKIMSLTKTAPDYLVGSNPPEDITKNRIYQILELNGYDPQYAASVFLGWAQKKFGKRNTIWLFGPATTGKTNIAEAIAHAVPFYGCVNWTNENFPFNDCVDKMVIWWEEGKMTAKVVESAKAILGGSKVRVDQKCKSSAQIEPTPVIVTSNTNMCAVIDGNSTTFEHQQPLQDRMFEFELTRRLDHDFGKVTKQEVKDFFRWASDHVTDVAHEFYVRKGGAKKRPASNDADVSEPKRECTSLAQPTTSDAEAPADYADRYQNKCSRHVGMNLMLFPCKTCERMNQISNVCFTHGQRDCGECFPGMSESQPVSVVKKKTYQKLCPIHHILGRAPEIACSACDLANVDLDDCVSEQ

SEQ ID NO: 66 - protein, 736 aa, Adeno-associated virus 3
  source 1..736: note = Adeno-associated virus 3B
MAADGYLPDWLEDNLSEGIREWWALKPGVPQPKANQQHQDNRRGLVLPGYKYLGPGNGLDKGEPVNEADAAALEHDKAYDQQLKAGDNPYLKYNHADAEFQERLQEDTSFGGNLGRAVFQAKKRILEPLGLVEEAAKTAPGKKRPVDQSPQEPDSSSGVGKSGKQPARKRLNFGQTGDSESVPDPQPLGEPPAAPTSLGSNTMASGGGAPMADNNEGADGVGNSSGNWHCDSQWLGDRVITTSTRTWALPTYNNHLYKQISSQSGASNDNHYFGYSTPWGYFDFNRFHCHFSPRDWQRLINNNWGFRPKKLSFKLFNIQVKEVTQNDGTTTIANNLTSTVQVFTDSEYQLPYVLGSAHQGCLPPFPADVFMVPQYGYLTLNNGSQAVGRSSFYCLEYFPSQMLRTGNNFQFSYTFEDVPFHSSYAHSQSLDRLMNPLIDQYLYYLNRTQGTTSGTTNQSRLLFSQAGPQSMSLQARNWLPGPCYRQQRLSKTANDNNNSNFPWTAASKYHLNGRDSLVNPGPAMASHKDDEEKFFPMHGNLIFGKEGTTASNAELDNVMITDEEEIRTTNPVATEQYGTVANNLQSSNTAPTTRTVNDQGALPGMVWQDRDVYLQGPIWAKIPHTDGHFHPSPLMGGFGLKHPPPQIMIKNTPVPANPPTTFSPAKFASFITQYSTGQVSVEIEWELQKENSKRWNPEIQYTSNYNKSVNVDFTVDTNGVYSEPRPIGTRYLTRNL

SEQ ID NO: 67 - protein, 624 aa, Adeno-associated virus 3
  source 1..624: note = Adeno-associated virus 3B
MPGFYEIVLKVPSDLDEHLPGISNSFVNWVAEKEWELPPDSDMDPNLIEQAPLTVAEKLQREFLVEWRRVSKAPEALFFVQFEKGETYFHLHVLIETIGVKSMVVGRYVSQIKEKLVTRIYRGVEPQLPNWFAVTKTRNGAGGGNKVVDDCYIPNYLLPKTQPELQWAWTNMDQYLSACLNLAERKRLVAQHLTHVSQTQEQNKENQNPNSDAPVIRSKTSARYMELVGWLVDRGITSEKQWIQEDQASYISFNAASNSRSQIKAALDNASKIMSLTKTAPDYLVGSNPPEDITKNRIYQILELNGYDPQYAASVFLGWAQKKFGKRNTIWLFGPATTGKTNIAEAIAHAVPFYGCVNWTNENFPFNDCVDKMVIWWEEGKMTAKVVESAKAILGGSKVRVDQKCKSSAQIEPTPVIVTSNTNMCAVIDGNSTTFEHQQPLQDRMFKFELTRRLDHDFGKVTKQEVKDFFRWASDHVTDVAHEFYVRKGGAKKRPASNDADVSEPKRQCTSLAQPTTSDAEAPADYADRYQNKCSRHVGMNLMLFPCKTCERMNQISNVCFTHGQRDCGECFPGMSESQPVSVVKKKTYQKLCPIHHILGRAPEIACSACDLANVDLDDCVSEQ

SEQ ID NO: 68 - DNA, 4722 bp, Adeno-associated virus 3
  source 1..4722: mol_type = unassigned DNA; note = Adeno-associated virus 3B
tggccactccctctatgcgcactcgctcgctcggtggggcctggcgaccaaaggtcgccagacggacgtgctttgcacgtccggccccaccgagcgagcgagtgcgcatagagggagtggccaactccatcactagaggtatggcagtgacgtaacgcgaagcgcgcgaagcgagaccacgcctaccagctgcgtcagcagtcaggtgacccttttgcgacagtttgcgacaccacgtggccgctgagggtatatattctcgagtgagcgaaccaggagctccattttgaccgcgaaatttgaacgagcagcagccatgccggggttctacgagattgtcctgaaggtcccgagtgacctggacgagcacctgccgggcatttctaactcgtttgttaactgggtggccgagaaggaatgggagctgccgccggattctgacatggatccgaatctgattgagcaggcacccctgaccgtggccgaaaagcttcagcgcgagttcctggtggagtggcgccgcgtgagtaaggccccggaggccctcttttttgtccagttcgaaaagggggagacctacttccacctgcacgtgctgattgagaccatcggggtcaaatccatggtggtcggccgctacgtgagccagattaaagagaagctggtgacccgcatctaccgcggggtcgagccgcagcttccgaactggttcgcggtgaccaaaacgcgaaatggcgccgggggcgggaacaaggtggtggacgactgctacatccccaactacctgctccccaagacccagcccgagctccagtgggcgtggactaacatggaccagtatttaagcgcctgtttgaatctcgcggagcgtaaacggctggtggcgcagcatctgacgcacgtgtcgcagacgcaggagcagaacaaagagaatcagaaccccaattctgacgcgccggtcatcaggtcaaaaacctcagccaggtacatggagctggtcgggtggctggtggaccgcgggatcacgtcagaaaagcaatggattcaggaggaccaggcctcgtacatctccttcaacgccgcctccaactcgcggtcccagatcaaggccgcgctggacaatgcctccaagatcatgagcctgacaaagacggctccggactacctggtgggcagcaacccgccggaggacattaccaaaaatcggatctaccaaatcctggagctgaacgggtacgatccgcagtacgcggcctccgtcttcctgggctgggcgcaaaagaagttcgggaagaggaacaccatctggctctttgggccggccacgacgggtaaaaccaacatcgcggaagccatcgcccacgccgtgcccttctacggctgcgtaaactggaccaatgagaactttcccttcaacgattgcgtcgacaagatggtgatctggtgggaggagggcaagatgacggccaaggtcgtggagagcgccaaggccattctgggcggaagcaaggtgcgcgtggaccaaaagtgcaagtcatcggcccagatcgaacccactcccgtgatcgtcacctccaacaccaacatgtgcgccgtgattgacgggaacagcaccaccttcgagcatcagcagccgctgcaggaccggatgtttaaatttgaacttacccgccgtttggaccatgactttgggaaggtcaccaaacaggaagtaaaggactttttccggtgggcttccgatcacgtgactgacgtggctcatgagttctacgtcagaaagggtggagctaagaaacgccccgcctccaatgacgcggatgtaagcgagccaaaacggcagtgcacgtcacttgcgcagccgacaacgtcagacgcggaagcaccggcggactacgcggacaggtaccaaaacaaatgttctcgtcacgtgggcatgaatctgatgctttttccctgtaaaacatgcgagagaatgaatcaaatttccaatgtctgttttacgcatggtcaaagagactgtggggaatgcttccctggaatgtcagaatctcaacccgtttctgtcgtcaaaaagaagacttatcagaaactgtgtccaattcatcatatcctgggaagggcacccgagattgcctgttcggcctgcgatttggccaatgtggacttggatgactgtgtttctgagcaataaatgacttaaaccaggtatggctgctgacggttatcttccagattggctcgaggacaacctttctgaaggcattcgtgagtggtgggctctgaaacctggagtccctcaacccaaagcgaaccaacaacaccaggacaaccgtcggggtcttgtgcttccgggttacaaatacctcggacccggtaacggactcgacaaaggagagccggtcaacgaggcggacgcggcagccctcgaacacgacaaagcttacgaccagcagctcaaggccggtgacaacccgtacctcaagtacaaccacgccgacgccgagtttcaggagcgtcttcaagaagatacgtcttttgggggcaaccttggcagagcagtcttccaggccaaaaagaggatccttgagcctcttggtctggttgaggaagcagctaaaacggctcctggaaagaagaggcctgtagatcagtctcctcaggaaccggactcatcatctggtgttggcaaatcgggcaaacagcctgccagaaaaagactaaatttcggtcagactggcgactcagagtcagtcccagaccctcaacctctcggagaaccaccagcagcccccacaagtttgggatctaatacaatggcttcaggcggtggcgcaccaatggcagacaataacgagggtgccgatggagtgggtaattcctcaggaaattggcattgcgattcccaatggctgggcgacagagtcatcaccaccagcaccagaacctgggccctgcccacttacaacaaccatctctacaagcaaatctccagccaatcaggagcttcaaacgacaaccactactttggctacagcaccccttgggggtattttgactttaacagattccactgccacttctcaccacgtgactggcagcgactcattaacaacaactggggattccggcccaagaaactcagcttcaagctcttcaacatccaagttaaagaggtcacgcagaacgatggcacgacgactattgccaataaccttaccagcacggttcaagtgtttacggactcggagtatcagctcccgtacgtgctcgggtcggcgcaccaaggctgtctcccgccgtttccagcggacgtcttcatggtccctcagtatggatacctcaccctgaacaacggaagtcaagcggtgggacgctcatccttttactgcctggagtacttcccttcgcagatgctaaggactggaaataacttccaattcagctataccttcgaggatgtaccttttcacagcagctacgctcacagccagagtttggatcgcttgatgaatcctcttattgatcagtatctgtactacctgaacagaacgcaaggaacaacctctggaacaaccaaccaatcacggctgctttttagccaggctgggcctcagtctatgtctttgcaggccagaaattggctacctgggccctgctaccggcaacagagactttcaaagactgctaacgacaacaacaacagtaactttccttggacagcggccagcaaatatcatctcaatggccgcgactcgctggtgaatccaggaccagctatggccagtcacaaggacgatgaagaaaaatttttccctatgcacggcaatctaatatttggcaaagaagggacaacggcaagtaacgcagaattagataatgtaatgattacggatgaagaagagattcgtaccaccaatcctgtggcaacagagcagtatggaactgtggcaaataacttgcagagctcaaatacagctcccacgactagaactgtcaatgatcagggggccttacctggcatggtgtggcaagatcgtgacgtgtaccttcaaggacctatctgggcaaagattcctcacacggatggacactttcatccttctcctctgatgggaggctttggactgaaacatccgcctcctcaaatcatgatcaaaaatactccggtaccggcaaatcctccgacgactttcagcccggccaagtttgcttcatttatcactcagtactccactggacaggtcagcgtggaaattgagtgggagctacagaaagaaaacagcaaacgttggaatccagagattcagtacacttccaactacaacaagtctgttaatgtggactttactgtagacactaatggtgtttatagtgaacctcgccctattggaacccggtatctcacacgaaacttgtaatcctggttaatcaataaaccgtttaattcgtttcagttgaactttggctcttgtgcacttcttatcttatcttgtttccatggctactgcgtagataagcagcggcctgcggcgcttgcgcttcgcggtttacaactgctggttaatatttaactctcgccatacctctagtgatggagttggccactccctctatgcgcactcgctcgctcggtggggccggacgtgcaaagcacgtccgtctggcgacctttggtcgccaggccccaccgagcgagcgagtgcgcatagagggagtggccaa

SEQ ID NO: 69 - DNA, 1800 bp, Adeno-associated virus 4
  misc_difference 342: note = modified_base - a, c, t or g
  source 1..1800: mol_type = unassigned DNA
acggctcctggaaagaagagaccgttgattgaatccccccagcagcccgactcctccacgggtatcggcaaaaaaggcaagcagccggctaaaaagaagctcgttttcgaagacgaaactggagcaggcgacggaccccctgagggatcaacttccggagccatgtctgatgacagtgagatgcgtgcagcagctggcggagctgcagtcgagggsggacaaggtgccgatggagtgggtaatgcctcgggtgattggcattgcgattccacctggtctgagggccacgtcacgaccaccagcaccagaacctgggtcttgcccacctacaacaaccacctntacaagcgactcggagagagcctgcagtccaacacctacaacggattctccaccccctggggatactttgacttcaaccgcttccactgccacttctcaccacgtgactggcagcgactcatcaacaacaactggggcatgcgacccaaagccatgcgggtcaaaatcttcaacatccaggtcaaggaggtcacgacgtcgaacggcgagacaacggtggctaataaccttaccagcacggttcagatctttgcggactcgtcgtacgaactgccgtacgtgatggatgcgggtcaagagggcagcctgcctccttttcccaacgacgtctttatggtgccccagtacggctactgtggactggtgaccggcaacacttcgcagcaacagactgacagaaatgccttctactgcctggagtactttccttcgcagatgctgcggactggcaacaactttgaaattacgtacagttttgagaaggtgcctttccactcgatgtacgcgcacagccagagcctggaccggctgatgaaccctctcatcgaccagtacctgtggggactgcaatcgaccaccaccggaaccaccctgaatgccgggactgccaccaccaactttaccaagctgcggcctaccaacttttccaactttaaaaagaactggctgcccgggccttcaatcaagcagcagggcttctcaaagactgccaatcaaaactacaagatccctgccaccgggtcagacagtctcatcaaatacgagacgcacagcactctggacggaagatggagtgccctgacccccggacctccaatggccacggctggacctgcggacagcaagttcagcaacagccagctcatctttgcggggcctaaacagaacggcaacacggccaccgtacccgggactctgatcttcacctctgaggaggagctggcagccaccaacgccaccgatacggacatgtggggcaacctacctggcggtgaccagagcaacagcaacctgccgaccgtggacagactgacagccttgggagccgtgcctggaatggtctggcaaaacagagacatttactaccagggtcccatttgggccaagattcctcataccgatggacactttcacccctcaccgctgattggtgggtttgggctgaaacacccgcctcctcaaatttttatcaagaacaccccggtacctgcgaatcctgcaacgaccttcagctctactccggtaaactccttcattactcagtacagcactggccaggtgtcggtgcagattgactgggagatccagaaggagcggtccaaacgctggaaccccgaggtccagtttacctccaactacggacagcaaaactctctgttgtgggctcccgatgcggctgggaaatacactgagcctagggctatcggtacccgctacctcacccaccacctgtaataa

SEQ ID NO: 70 - DNA, 2208 bp, Adeno-associated virus 4
  misc_difference 750: note = modified_base - a, c, t or g
  source 1..2208: mol_type = unassigned DNA
atgactgacggttaccttccagattggctagaggacaacctctctgaaggcgttcgagagtggtgggcgctgcaacctggagcccctaaacccaaggcaaatcaacaacatcaggacaacgctcggggtcttgtgcttccgggttacaaatacctcggacccggcaacggactcgacaagggggaacccgtcaacgcagcggacgcggcagccctcgagcacgacaaggcctacgaccagcagctcaaggccggtgacaacccctacctcaagtacaaccacgccgacgcggagttccagcagcggcttcagggcgacacatcgtttgggggcaacctcggcagagcagtcttccaggccaaaaagagggttcttgaacctcttggtctggttgagcaagcgggtgagacggctcctggaaagaagagaccgttgattgaatccccccagcagcccgactcctccacgggtatcggcaaaaaaggcaagcagccggctaaaaagaagctcgttttcgaagacgaaactggagcaggcgacggaccccctgagggatcaacttccggagccatgtctgatgacagtgagatgcgtgcagcagctggcggagctgcagtcgagggsggacaaggtgccgatggagtgggtaatgcctcgggtgattggcattgcgattccacctggtctgagggccacgtcacgaccaccagcaccagaacctgggtcttgcccacctacaacaaccacctntacaagcgactcggagagagcctgcagtccaacacctacaacggattctccaccccctggggatactttgacttcaaccgcttccactgccacttctcaccacgtgactggcagcgactcatcaacaacaactggggcatgcgacccaaagccatgcgggtcaaaatcttcaacatccaggtcaaggaggtcacgacgtcgaacggcgagacaacggtggctaataaccttaccagcacggttcagatctttgcggactcgtcgtacgaactgccgtacgtgatggatgcgggtcaagagggcagcctgcctccttttcccaacgacgtctttatggtgccccagtacggctactgtggactggtgaccggcaacacttcgcagcaacagactgacagaaatgccttctactgcctggagtactttccttcgcagatgctgcggactggcaacaactttgaaattacgtacagttttgagaaggtgcctttccactcgatgtacgcgcacagccagagcctggaccggctgatgaaccctctcatcgaccagtacctgtggggactgcaatcgaccaccaccggaaccaccctgaatgccgggactgccaccaccaactttaccaagctgcggcctaccaacttttccaactttaaaaagaactggctgcccgggccttcaatcaagcagcagggcttctcaaagactgccaatcaaaactacaagatccctgccaccgggtcagacagtctcatcaaatacgagacgcacagcactctggacggaagatggagtgccctgacccccggacctccaatggccacggctggacctgcggacagcaagttcagcaacagccagctcatctttgcggggcctaaacagaacggcaacacggccaccgtacccgggactctgatcttcacctctgaggaggagctggcagccaccaacgccaccgatacggacatgtggggcaacctacctggcggtgaccagagcaacagcaacctgccgaccgtggacagactgacagccttgggagccgtgcctggaatggtctggcaaaacagagacatttactaccagggtcccatttgggccaagattcctcataccgatggacactttcacccctcaccgctgattggtgggtttgggctgaaacacccgcctcctcaaatttttatcaagaacaccccggtacctgcgaatcctgcaacgaccttcagctctactccggtaaactccttcattactcagtacagcactggccaggtgtcggtgcagattgactgggagatccagaaggagcggtccaaacgctggaaccccgaggtccagtttacctccaactacggacagcaaaactctctgttgtgggctcccgatgcggctgggaaatacactgagcctagggctatcggtacccgctacctcacccaccacctgtaataa

SEQ ID NO: 71 - DNA, 1872 bp, Adeno-associated virus 4
  source 1..1872: mol_type = unassigned DNA
atgccggggttctacgagatcgtgctgaaggtgcccagcgacctggacgagcacctgcccggcatttctgactcttttgtgagctgggtggccgagaaggaatgggagctgccgccggattctgacatggacttgaatctgattgagcaggcacccctgaccgtggccgaaaagctgcaacgcgagttcctggtcgagtggcgccgcgtgagtaaggccccggaggccctcttctttgtccagttcgagaagggggacagctacttccacctgcacatcctggtggagaccgtgggcgtcaaatccatggtggtgggccgctacgtgagccagattaaagagaagctggtgacccgcatctaccgcggggtcgagccgcagcttccgaactggttcgcggtgaccaagacgcgtaatggcgccggaggcgggaacaaggtggtggacgactgctacatccccaactacctgctccccaagacccagcccgagctccagtgggcgtggactaacatggaccagtatataagcgcctgtttgaatctcgcggagcgtaaacggctggtggcgcagcatctgacgcacgtgtcgcagacgcaggagcagaacaaggaaaaccagaaccccaattctgacgcgccggtcatcaggtcaaaaacctccgccaggtacatggagctggtcgggtggctggtggaccgcgggatcacgtcagaaaagcaatggatccaggaggaccaggcgtcctacatctccttcaacgccgcctccaactcgcggtcacaaatcaaggccgcgctggacaatgcctccaaaatcatgagcctgacaaagacggctccggactacctggtgggccagaacccgccggaggacatttccagcaaccgcatctaccgaatcctcgagatgaacgggtacgatccgcagtacgcggcctccgtcttcctgggctgggcgcaaaagaagttcgggaagaggaacaccatctggctctttgggccggccacgacgggtaaaaccaacatcgcggaagccatcgcccacgccgtgcccttctacggctgcgtgaactggaccaatgagaactttccgttcaacgattgcgtcgacaagatggtgatctggtgggaggagggcaagatgacggccaaggtcgtagagagcgccaaggccatcctgggcggaagcaaggtgcgcgtggaccaaaagtgcaagtcatcggcccagatcgacccaactcccgtgatcgtcacctccaacaccaacatgtgcgcggtcatcgacggaaactcgaccaccttcgagcaccaacaaccactccaggaccggatgttcaagttcgagctcaccaagcgcctggagcacgactttggcaaggtcaccaagcaggaagtcaaagactttttccggtgggcgtcagatcacgtgaccgaggtgactcacgagttttacgtcagaaagggtggagctagaaagaggcccgcccccaatgacgcagatataagtgagcccaagcgggcctgtccgtcagttgcgcagccatcgacgtcagacgcggaagctccggtggactacgcggacaggtaccaaaacaaatgttctcgtcacgtgggtatgaatctgatgctttttccctgccggcaatgcgagagaatgaatcagaatgtggacatttgcttcacgcacggggtcatggactgtgccgagtgcttccccgtgtcagaatctcaacccgtgtctgtcgtcagaaagcggacgtatcagaaactgtgtccgattcatcacatcatggggagggcgcccgaggtggcctgctcggcctgcgaactggccaatgtggacttggatgactgtgacatggaacaataa

SEQ ID NO: 72 - DNA, 1611 bp, Adeno-associated virus 4
  source 1..1611: mol_type = unassigned DNA
atgccggggttctacgagatcgtgctgaaggtgcccagcgacctggacgagcacctgcccggcatttctgactcttttgtgagctgggtggccgagaaggaatgggagctgccgccggattctgacatggacttgaatctgattgagcaggcacccctgaccgtggccgaaaagctgcaacgcgagttcctggtcgagtggcgccgcgtgagtaaggccccggaggccctcttctttgtccagttcgagaagggggacagctacttccacctgcacatcctggtggagaccgtgggcgtcaaatccatggtggtgggccgctacgtgagccagattaaagagaagctggtgacccgcatctaccgcggggtcgagccgcagcttccgaactggttcgcggtgaccaagacgcgtaatggcgccggaggcgggaacaaggtggtggacgactgctacatccccaactacctgctccccaagacccagcccgagctccagtgggcgtggactaacatggaccagtatataagcgcctgtttgaatctcgcggagcgtaaacggctggtggcgcagcatctgacgcacgtgtcgcagacgcaggagcagaacaaggaaaaccagaaccccaattctgacgcgccggtcatcaggtcaaaaacctccgccaggtacatggagctggtcgggtggctggtggaccgcgggatcacgtcagaaaagcaatggatccaggaggaccaggcgtcctacatctccttcaacgccgcctccaactcgcggtcacaaatcaaggccgcgctggacaatgcctccaaaatcatgagcctgacaaagacggctccggactacctggtgggccagaacccgccggaggacatttccagcaaccgcatctaccgaatcctcgagatgaacgggtacgatccgcagtacgcggcctccgtcttcctgggctgggcgcaaaagaagttcgggaagaggaacaccatctggctctttgggccggccacgacgggtaaaaccaacatcgcggaagccatcgcccacgccgtgcccttctacggctgcgtgaactggaccaatgagaactttccgttcaacgattgcgtcgacaagatggtgatctggtgggaggagggcaagatgacggccaaggtcgtagagagcgccaaggccatcctgggcggaagcaaggtgcgcgtggaccaaaagtgcaagtcatcggcccagatcgacccaactcccgtgatcgtcacctccaacaccaacatgtgcgcggtcatcgacggaaactcgaccaccttcgagcaccaacaaccactccaggaccggatgttcaagttcgagctcaccaagcgcctggagcacgactttggcaaggtcaccaagcaggaagtcaaagactttttccggtgggcgtcagatcacgtgaccgaggtgactcacgagttttacgtcagaaagggtggagctagaaagaggcccgcccccaatgacgcagatataagtgagcccaagcgggcctgtccgtcagttgcgcagccatcgacgtcagacgcggaagctccggtggactacgcggacagattggctagaggacaacctctctga

SEQ ID NO: 73 - DNA, 1872 bp, Adeno-associated virus 4; identical to SEQ ID NO: 71
  source 1..1872: mol_type = unassigned DNA

SEQ ID NO: 74 - DNA, 1617 bp, Adeno-associated virus 4
  misc_difference 162: note = modified_base - a, c, t or g
  source 1..1617: mol_type = unassigned DNA
atgcgtgcagcagctggcggagctgcagtcgagggsggacaaggtgccgatggagtgggtaatgcctcgggtgattggcattgcgattccacctggtctgagggccacgtcacgaccaccagcaccagaacctgggtcttgcccacctacaacaaccacctntacaagcgactcggagagagcctgcagtccaacacctacaacggattctccaccccctggggatactttgacttcaaccgcttccactgccacttctcaccacgtgactggcagcgactcatcaacaacaactggggcatgcgacccaaagccatgcgggtcaaaatcttcaacatccaggtcaaggaggtcacgacgtcgaacggcgagacaacggtggctaataaccttaccagcacggttcagatctttgcggactcgtcgtacgaactgccgtacgtgatggatgcgggtcaagagggcagcctgcctccttttcccaacgacgtctttatggtgccccagtacggctactgtggactggtgaccggcaacacttcgcagcaacagactgacagaaatgccttctactgcctggagtactttccttcgcagatgctgcggactggcaacaactttgaaattacgtacagttttgagaaggtgcctttccactcgatgtacgcgcacagccagagcctggaccggctgatgaaccctctcatcgaccagtacctgtggggactgcaatcgaccaccaccggaaccaccctgaatgccgggactgccaccaccaactttaccaagctgcggcctaccaacttttccaactttaaaaagaactggctgcccgggccttcaatcaagcagcagggcttctcaaagactgccaatcaaaactacaagatccctgccaccgggtcagacagtctcatcaaatacgagacgcacagcactctggacggaagatggagtgccctgacccccggacctccaatggccacggctggacctgcggacagcaagttcagcaacagccagctcatctttgcggggcctaaacagaacggcaacacggccaccgtacccgggactctgatcttcacctctgaggaggagctggcagccaccaacgccaccgatacggacatgtggggcaacctacctggcggtgaccagagcaacagcaacctgccgaccgtggacagactgacagccttgggagccgtgcctggaatggtctggcaaaacagagacatttactaccagggtcccatttgggccaagattcctcataccgatggacactttcacccctcaccgctgattggtgggtttgggctgaaacacccgcctcctcaaatttttatcaagaacaccccggtacctgcgaatcctgcaacgaccttcagctctactccggtaaactccttcattactcagtacagcactggccaggtgtcggtgcagattgactgggagatccagaaggagcggtccaaacgctggaaccccgaggtccagtttacctccaactacggacagcaaaactctctgttgtgggctcccgatgcggctgggaaatacactgagcctagggctatcggtacccgctacctcacccaccacctgtaa

SEQ ID NO: 75 - DNA, 939 bp, Adeno-associated virus 4
  source 1..939: mol_type = unassigned DNA
atggagctggtcgggtggctggtggaccgcgggatcacgtcagaaaagcaatggatccaggaggaccaggcgtcctacatctccttcaacgccgcctccaactcgcggtcacaaatcaaggccgcgctggacaatgcctccaaaatcatgagcctgacaaagacggctccggactacctggtgggccagaacccgccggaggacatttccagcaaccgcatctaccgaatcctcgagatgaacgggtacgatccgcagtacgcggcctccgtcttcctgggctgggcgcaaaagaagttcgggaagaggaacaccatctggctctttgggccggccacgacgggtaaaaccaacatcgcggaagccatcgcccacgccgtgcccttctacggctgcgtgaactggaccaatgagaactttccgttcaacgattgcgtcgacaagatggtgatctggtgggaggagggcaagatgacggccaaggtcgtagagagcgccaaggccatcctgggcggaagcaaggtgcgcgtggaccaaaagtgcaagtcatcggcccagatcgacccaactcccgtgatcgtcacctccaacaccaacatgtgcgcggtcatcgacggaaactcgaccaccttcgagcaccaacaaccactccaggaccggatgttcaagttcgagctcaccaagcgcctggagcacgactttggcaaggtcaccaagcaggaagtcaaagactttttccggtgggcgtcagatcacgtgaccgaggtgactcacgagttttacgtcagaaagggtggagctagaaagaggcccgcccccaatgacgcagatataagtgagcccaagcgggcctgtccgtcagttgcgcagccatcgacgtcagacgcggaagctccggtggactacgcggacagattggctagaggacaacctctctga

SEQ ID NO: 76 - DNA, 1197 bp, Adeno-associated virus 4
  source 1..1197: mol_type = unassigned DNA
atggagctggtcgggtggctggtggaccgcgggatcacgtcagaaaagcaatggatccaggaggaccaggcgtcctacatctccttcaacgccgcctccaactcgcggtcacaaatcaaggccgcgctggacaatgcctccaaaatcatgagcctgacaaagacggctccggactacctggtgggccagaacccgccggaggacatttccagcaaccgcatctaccgaatcctcgagatgaacgggtacgatccgcagtacgcggcctccgtcttcctgggctgggcgcaaaagaagttcgggaagaggaacaccatctggctctttgggccggccacgacgggtaaaaccaacatcgcggaagccatcgcccacgccgtgcccttctacggctgcgtgaactggaccaatgagaactttccgttcaacgattgcgtcgacaagatggtgatctggtgggaggagggcaagatgacggccaaggtcgtagagagcgccaaggccatcctgggcggaagcaaggtgcgcgtggaccaaaagtgcaagtcatcggcccagatcgacccaactcccgtgatcgtcacctccaacaccaacatgtgcgcggtcatcgacggaaactcgaccaccttcgagcaccaacaaccactccaggaccggatgttcaagttcgagctcaccaagcgcctggagcacgactttggcaaggtcaccaagcaggaagtcaaagactttttccggtgggcgtcagatcacgtgaccgaggtgactcacgagttttacgtcagaaagggtggagctagaaagaggcccgcccccaatgacgcagatataagtgagcccaagcgggcctgtccgtcagttgcgcagccatcgacgtcagacgcggaagctccggtggactacgcggacaggtaccaaaacaaatgttctcgtcacgtgggtatgaatctgatgctttttccctgccggcaatgcgagagaatgaatcagaatgtggacatttgcttcacgcacggggtcatggactgtgccgagtgcttccccgtgtcagaatctcaacccgtgtctgtcgtcagaaagcggacgtatcagaaactgtgtccgattcatcacatcatggggagggcgcccgaggtggcctgctcggcctgcgaactggccaatgtggacttggatgactgtgacatggaacaa

SEQ ID NO: 77 - DNA, 245 bp, Adeno-associated virus 4
  source 1..245: mol_type = unassigned DNA
ctccatcatctaggtttgcccactgacgtcaatgtgacgtcctagggttagggaggtccctgtattagcagtcacgtgagtgtcgtatttcgcggagcgtagcggagcgcataccaagctgccacgtcacagccacgtggtccgtttgcgacagtttgcgacaccatgtggtcaggagggtatataaccgcgagtgagccagcgaggagctccattttgcccgcgaattttgaacgagcagcagc

SEQ ID NO: 78 - protein, 313 aa, Adeno-associated virus 4
  VARIANT 313: note = MOD_RES - Any amino acid
MELVGWLVDRGITSEKQWIQEDQASYISFNAASNSRSQIKAALDNASKIMSLTKTAPDYLVGQNPPEDISSNRIYRILEMNGYDPQYAASVFLGWAQKKFGKRNTIWLFGPATTGKTNIAEAIAHAVPFYGCVNWTNENFPFNDCVDKMVIWWEEGKMTAKVVESAKAILGGSKVRVDQKCKSSAQIDPTPVIVTSNTNMCAVIDGNSTTFEHQQPLQDRMFKFELTKRLEHDFGKVTKQEVKDFFRWASDHVTEVTHEFYVRKGGARKRPAPNDADISEPKRACPSVAQPSTSDAEAPVDYADRLARGQPLX

SEQ ID NO: 79 - protein, 399 aa, Adeno-associated virus 4
MELVGWLVDRGITSEKQWIQEDQASYISFNAASNSRSQIKAALDNASKIMSLTKTAPDYLVGQNPPEDISSNRIYRILEMNGYDPQYAASVFLGWAQKKFGKRNTIWLFGPATTGKTNIAEAIAHAVPFYGCVNWTNENFPFNDCVDKMVIWWEEGKMTAKVVESAKAILGGSKVRVDQKCKSSAQIDPTPVIVTSNTNMCAVIDGNSTTFEHQQPLQDRMFKFELTKRLEHDFGKVTKQEVKDFFRWASDHVTEVTHEFYVRKGGARKRPAPNDADISEPKRACPSVAQPSTSDAEAPVDYADRYQNKCSRHVGMNLMLFPCRQCERMNQNVDICFTHGVMDCAECFPVSESQPVSVVRKRTYQKLCPIHHIMGRAPEVACSACELANVDLDDCDMEQ

SEQ ID NO: 80 - protein, 623 aa, Adeno-associated virus 4
MPGFYEIVLKVPSDLDEHLPGISDSFVSWVAEKEWELPPDSDMDLNLIEQAPLTVAEKLQREFLVEWRRVSKAPEALFFVQFEKGDSYFHLHILVETVGVKSMVVGRYVSQIKEKLVTRIYRGVEPQLPNWFAVTKTRNGAGGGNKVVDDCYIPNYLLPKTQPELQWAWTNMDQYISACLNLAERKRLVAQHLTHVSQTQEQNKENQNPNSDAPVIRSKTSARYMELVGWLVDRGITSEKQWIQEDQASYISFNAASNSRSQIKAALDNASKIMSLTKTAPDYLVGQNPPEDISSNRIYRILEMNGYDPQYAASVFLGWAQKKFGKRNTIWLFGPATTGKTNIAEAIAHAVPFYGCVNWTNENFPFNDCVDKMVIWWEEGKMTAKVVESAKAILGGSKVRVDQKCKSSAQIDPTPVIVTSNTNMCAVIDGNSTTFEHQQPLQDRMFKFELTKRLEHDFGKVTKQEVKDFFRWASDHVTEVTHEFYVRKGGARKRPAPNDADISEPKRACPSVAQPSTSDAEAPVDYADRYQNKCSRHVGMNLMLFPCRQCERMNQNVDICFTHGVMDCAECFPVSESQPVSVVRKRTYQKLCPIHHIMGRAPEVACSACELANVDLDDCDMEQ

SEQ ID NO: 81 - protein, 537 aa, Adeno-associated virus 4
  VARIANT 537: note = MOD_RES - Any amino acid
MPGFYEIVLKVPSDLDEHLPGISDSFVSWVAEKEWELPPDSDMDLNLIEQAPLTVAEKLQREFLVEWRRVSKAPEALFFVQFEKGDSYFHLHILVETVGVKSMVVGRYVSQIKEKLVTRIYRGVEPQLPNWFAVTKTRNGAGGGNKVVDDCYIPNYLLPKTQPELQWAWTNMDQYISACLNLAERKRLVAQHLTHVSQTQEQNKENQNPNSDAPVIRSKTSARYMELVGWLVDRGITSEKQWIQEDQASYISFNAASNSRSQIKAALDNASKIMSLTKTAPDYLVGQNPPEDISSNRIYRILEMNGYDPQYAASVFLGWAQKKFGKRNTIWLFGPATTGKTNIAEAIAHAVPFYGCVNWTNENFPFNDCVDKMVIWWEEGKMTAKVVESAKAILGGSKVRVDQKCKSSAQIDPTPVIVTSNTNMCAVIDGNSTTFEHQQPLQDRMFKFELTKRLEHDFGKVTKQEVKDFFRWASDHVTEVTHEFYVRKGGARKRPAPNDADISEPKRACPSVAQPSTSDAEAPVDYADRLARGQPLX

SEQ ID NO: 82 - protein, 623 aa, Adeno-associated virus 4; identical to SEQ ID NO: 80

SEQ ID NO: 83 - protein, 544 aa, Adeno-associated virus 4
MSDDSEMRAAAGGAAVEGGQGADGVGNASGDWHCDSTWSEGHVTTTSTRTWVLPTYNNHLYKRLGESLQSNTYNGFSTPWGYFDFNRFHCHFSPRDWQRLINNNWGMRPKAMRVKIFNIQVKEVTTSNGETTVANNLTSTVQIFADSSYELPYVMDAGQEGSLPPFPNDVFMVPQYGYCGLVTGNTSQQQTDRNAFYCLEYFPSQMLRTGNNFEITYSFEKVPFHSMYAHSQSLDRLMNPLIDQYLWGLQSTTTGTTLNAGTATTNFTKLRPTNFSNFKKNWLPGPSIKQQGFSKTANQNYKIPATGSDSLIKYETHSTLDGRWSALTPGPPMATAGPADSKFSNSQLIFAGPKQNGNTATVPGTLIFTSEEELAATNATDTDMWGNLPGGDQSNSNLPTVDRLTALGAVPGMVWQNRDIYYQGPIWAKIPHTDGHFHPSPLIGGFGLKHPPPQIFIKNTPVPANPATTFSSTPVNSFITQYSTGQVSVQIDWEIQKERSKRWNPEVQFTSNYGQQNSLLWAPDAAGKYTEPRAIGTRYLTHHL

SEQ ID NO: 84 - protein, 734 aa, Adeno-associated virus 4
MTDGYLPDWLEDNLSEGVREWWALQPGAPKPKANQQHQDNARGLVLPGYKYLGPGNGLDKGEPVNAADAAALEHDKAYDQQLKAGDNPYLKYNHADAEFQQRLQGDTSFGGNLGRAVFQAKKRVLEPLGLVEQAGETAPGKKRPLIESPQQPDSSTGIGKKGKQPAKKKLVFEDETGAGDGPPEGSTSGAMSDDSEMRAAAGGAAVEGGQGADGVGNASGDWHCDSTWSEGHVTTTSTRTWVLPTYNNHLYKRLGESLQSNTYNGFSTPWGYFDFNRFHCHFSPRDWQRLINNNWGMRPKAMRVKIFNIQVKEVTTSNGETTVANNLTSTVQIFADSSYELPYVMDAGQEGSLPPFPNDVFMVPQYGYCGLVTGNTSQQQTDRNAFYCLEYFPSQMLRTGNNFEITYSFEKVPFHSMYAHSQSLDRLMNPLIDQYLWGLQSTTTGTTLNAGTATTNFTKLRPTNFSNFKKNWLPGPSIKQQGFSKTANQNYKIPATGSDSLIKYETHSTLDGRWSALTPGPPMATAGPADSKFSNSQLIFAGPKQNGNTATVPGTLIFTSEEELAATNATDTDMWGNLPGGDQSNSNLPTVDRLTALGAVPGMVWQNRDIYYQGPIWAKIPHTDGHFHPSPLIGGFGLKHPPPQIFIKNTPVPANPATTFSSTPVNSFITQYSTGQVSVQIDWEIQKERSKRWNPEVQFTSNYGQQNSLLWAPDAAGKYTEPRAIGTRYLTHHL

SEQ ID NO: 85 - protein, 598 aa, Adeno-associated virus 4
TAPGKKRPLIESPQQPDSSTGIGKKGKQPAKKKLVFEDETGAGDGPPEGSTSGAMSDDSEMRAAAGGAAVEGGQGADGVGNASGDWHCDSTWSEGHVTTTSTRTWVLPTYNNHLYKRLGESLQSNTYNGFSTPWGYFDFNRFHCHFSPRDWQRLINNNWGMRPKAMRVKIFNIQVKEVTTSNGETTVANNLTSTVQIFADSSYELPYVMDAGQEGSLPPFPNDVFMVPQYGYCGLVTGNTSQQQTDRNAFYCLEYFPSQMLRTGNNFEITYSFEKVPFHSMYAHSQSLDRLMNPLIDQYLWGLQSTTTGTTLNAGTATTNFTKLRPTNFSNFKKNWLPGPSIKQQGFSKTANQNYKIPATGSDSLIKYETHSTLDGRWSALTPGPPMATAGPADSKFSNSQLIFAGPKQNGNTATVPGTLIFTSEEELAATNATDTDMWGNLPGGDQSNSNLPTVDRLTALGAVPGMVWQNRDIYYQGPIWAKIPHTDGHFHPSPLIGGFGLKHPPPQIFIKNTPVPANPATTFSSTPVNSFITQYSTGQVSVQIDWEIQKERSKRWNPEVQFTSNYGQQNSLLWAPDAAGKYTEPRAIGTRYLTHHL

SEQ ID NO: 86 - DNA, 129 bp, Adeno-associated virus 4
  source 1..129: mol_type = unassigned DNA
ttggccactccctctatgcgcgctcgctcactcactcggccctgcggccagaggccggcagtctggagacctttggtgtccagggcagggccgagtgagtgagcgagcgcgcatagagggagtggccaa

SEQ ID NO: 87 - DNA, 125 bp, Adeno-associated virus 4
  source 1..125: mol_type = unassigned DNA
ttggccactccctctatgcgcgctcgctcactcactcggccctggagaccaaaggtctccagactgccggcctctggccggcagggccgagtgagtgagcgagcgcgcatagagggagtggccaa

SEQ ID NO: 88 - DNA, 4768 bp, Adeno-associated virus 4
  misc_difference 3009: note = modified_base - a, c, t or g
  source 1..4768: mol_type = unassigned DNA
ttggccactccctctatgcgcgctcgctcactcactcggccctggagaccaaaggtctccagactgccggcctctggccggcagggccgagtgagtgagcgagcgcgcatagagggagtggccaactccatcatctaggtttgcccactgacgtcaatgtgacgtcctagggttagggaggtccctgtattagcagtcacgtgagtgtcgtatttcgcggagcgtagcggagcgcataccaagctgccacgtcacagccacgtggtccgtttgcgacagtttgcgacaccatgtggtcaggagggtatataaccgcgagtgagccagcgaggagctccattttgcccgcgaattttgaacgagcagcagccatgccggggttctacgagatcgtgctgaaggtgcccagcgacctggacgagcacctgcccggcatttctgactcttttgtgagctgggtggccgagaaggaatgggagctgccgccggattctgacatggacttgaatctgattgagcaggcacccctgaccgtggccgaaaagctgcaacgcgagttcctggtcgagtggcgccgcgtgagtaaggccccggaggccctcttctttgtccagttcgagaagggggacagctacttccacctgcacatcctggtggagaccgtgggcgtcaaatccatggtggtgggccgctacgtgagccagattaaagagaagctggtgacccgcatctaccgcggggtcgagccgcagcttccgaactggttcgcggtgaccaagacgcgtaatggcgccggaggcgggaacaaggtggtggacgactgctacatccccaactacctgctccccaagacccagcccgagctccagtgggcgtggactaacatggaccagtatataagcgcctgtttgaatctcgcggagcgtaaacggctggtggcgcagcatctgacgcacgtgtcgcagacgcaggagcagaacaaggaaaaccagaaccccaattctgacgcgccggtcatcaggtcaaaaacctccgccaggtacatggagctggtcgggtggctggtggaccgcgggatcacgtcagaaaagcaatggatccaggaggaccaggcgtcctacatctccttcaacgccgcctccaactcgcggtcacaaatcaaggccgcgctggacaatgcctccaaaatcatgagcctgacaaagacggctccggactacctggtgggccagaacccgccggaggacatttccagcaaccgcatctaccgaatcctcgagatgaacgggtacgatccgcagtacgcggcctccgtcttcctgggctgggcgcaaaagaagttcgggaagaggaacaccatctggctctttgggccggccacgacgggtaaaaccaacatcgcggaagccatcgcccacgccgtgcccttctacggctgcgtgaactggaccaatgagaactttccgttcaacgattgcgtcgacaagatggtgatctggtgggaggagggcaagatgacggccaaggtcgtagagagcgccaaggccatcctgggcggaagcaaggtgcgcgtggaccaaaagtgcaagtcatcggcccagatcgacccaactcccgtgatcgtcacctccaacaccaacatgtgcgcggtcatcgacggaaactcgaccaccttcgagcaccaacaaccactccaggaccggatgttcaagttcgagctcaccaagcgcctggagcacgactttggcaaggtcaccaagcaggaagtcaaagactttttccggtgggcgtcagatcacgtgaccgaggtgactcacgagttttacgtcagaaagggtggagctagaaagaggcccgcccccaatgacgcagatataagtgagcccaagcgggcctgtccgtcagttgcgcagccatcgacgtcagacgcggaagctccggtggactacgcggacaggtaccaaaacaaatgttctcgtcacgtgggtatgaatctgatgctttttccctgccggcaatgcgagagaatgaatcagaatgtggacatttgcttcacgcacggggtcatggactgtgccgagtgcttccccgtgtcagaatctcaacccgtgtctgtcgtcagaaagcggacgtatcagaaactgtgtccgattcatcacatcatggggagggcgcccgaggtggcctgctcggcctgcgaactggccaatgtggacttggatgactgtgacatggaacaataaatgactcaaaccagatatgactgacggttaccttccagattggctagaggacaacctctctgaaggcgttcgagagtggtgggcgctgcaacctggagcccctaaacccaaggcaaatcaacaacatcaggacaacgctcggggtcttgtgcttccgggttacaaatacctcggacccggcaacggactcgacaagggggaacccgtcaacgcagcggacgcggcagccctcgagcacgacaaggcctacgaccagcagctcaaggccggtgacaacccctacctcaagtacaaccacgccgacgcggagttccagcagcggcttcagggcgacacaccgtttgggggcaacctcggcagagcagtcttccaggccaaaaagagggttcttgaacctcttggtctggttgagcaagcgggtgagacggctcctggaaagaagagaccgttgattgaatccccccagcagcccgactcctccacgggtatcggcaaaaaaggcaagcagccggctaaaaagaagctcgttttcgaagacgaaactggagcaggcgacggaccccctgagggatcaacttccggagccatgtctgatgacagtgagatgcgtgcagcagctggcggagctgcagtcgagggsggacaaggtgccgatggagtgggtaatgcctcgggtgattggcattgcgattccacctggtctgagggccacgtcacgaccaccagcaccagaacctgggtcttgcccacctacaacaaccacctntacaagcgactcggagagagcctgcagtccaacacctacaacggattctccaccccctggggatactttgacttcaaccgcttccactgccacttctcaccacgtgactggcagcgactcatcaacaacaactggggcatgcgacccaaagccatgcgggtcaaaatcttcaacatccaggtcaaggaggtcacgacgtcgaacggcgagacaacggtggctaataaccttaccagcacggttcagatctttgcggactcgtcgtacgaactgccgtacgtgatggatgcgggtcaagagggcagcctgcctccttttcccaacgacgtctttatggtgccccagtacggctactgtggactggtgaccggcaacacttcgcagcaacagactgacagaaatgccttctactgcctggagtactttccttcgcagatgctgcggactggcaacaactttgaaattacgtacagttttgagaaggtgcctttccactcgatgtacgcgcacagccagagcctggaccggctgatgaaccctctcatcgaccagtacctgtggggactgcaatcgaccaccaccggaaccaccctgaatgccgggactgccaccaccaactttaccaagctgcggcctaccaacttttccaactttaaaaagaactggctgcccgggccttcaatcaagcagcagggcttctcaaagactgccaatcaaaactacaagatccctgccaccgggtcagacagtctcatcaaatacgagacgcacagcactctggacggaagatggagtgccctgacccccggacctccaatggccacggctggacctgcggacagcaagttcagcaacagccagctcatctttgcggggcctaaacagaacggcaacacggccaccgtacccgggactctgatcttcacctctgaggaggagctggcagccaccaacgccaccgatacggacatgtggggcaacctacctggcggtgaccagagcaacagcaacctgccgaccgtggacagactgacagccttgggagccgtgcctggaatggtctggcaaaacagagacatttactaccagggtcccatttgggccaagattcctcataccgatggacactttcacccctcaccgctgattggtgggtttgggctgaaacacccgcctcctcaaatttttatcaagaacaccccggtacctgcgaatcctgcaacgaccttcagctctactccggtaaactccttcattactcagtacagcactggccaggtgtcggtgcagattgactgggagatccagaaggagcggtccaaacgctggaaccccgaggtccagtttacctccaactacggacagcaaaactctctgttgtgggctcccgatgcggctgggaaatacactgagcctagggctatcggtacccgctacctcacccaccacctgtaataacctgttaatcaataaaccggtttattcgtttcagttgaactttggtctccgtgtccttcttatcttatctcgtttccatggctactgcgtacataagcagcggcctgcggcgcttgcgcttcgcggtttacaactgccggttaatcagtaacttctggcaaaccatgatgatggagttggccactccctctatgcgcgctcgctcactcactcggccctggagaccaaaggtctccagactgccggcctctggccggcagggccgagtgagtgagcgagcgcgcatagagggagtggccaa

SEQ ID NO: 89 - protein, 3098 aa, Adeno-associated virus
GAATTCGCCCTTTCTACGGCTGCGTCAACTGGACCAATGAGAACTTTCCCTTCAACGATTGCGTCGACAAGATGGTGATCTGGTGGGAGGAGGGCAAGATGACGGCCAAGGTCGTGGAGTCCGCCAAGGCCATTCTCGGCGGCAGCAAGGTGCGCGTGGACCAAAAGTGCAAGTCTTCCGCCCAGATCGATCCCACCCCCGTGATCGTCACTTCCAACACCAACATGTGCGCTGTGATTGACGGGAACAGCACCACCTTCGAGCACCAGCAGCCGTTACAAGACCGGATGTTCAAATTTGAACTCACCCGCCGTCTGGAGCACGACTTTGGCAAGGTGACAAAGCAGGAAGTCAAAGAGTTCTTCCGCTGGGCGCAGGATCACGTGACCGAGGTGGCGCATGAGTTCTACGTCAGAAAGGGTGGAGCCAACAAGAGACCCGCCCCCGATGACGCGGATAAAAGCGAGCCCAAGCGGGCCTGCCCCTCAGTCGCGGATCCATCGACGTCAGACGCGGAAGGAGCTCCGGTGGACTTTGCCGACAGGTACCAAAACAAATGTTCTCGTCACGCGGGCATGCTTCAGATGCTGTTTCCCTGCAAGACATGCGAGAGAATGAATCAGAATTTCAACATTTGCTTCACGCACGGGACCAGAGACTGTTCAGAATGTTTCCCCGGCGTGTCAGAATCTCAACCGGTCGTCAGAAAGAGGACGTATCGGAAACTCTGTGCCATTCATCATCTGCTGGGGCGGGCTCCCGAGATTGCTTGCTCGGCCTGCGATCTGGTCAACGTGGACCTGGATGACCGTGTTTCTGAGCAATAAATGACTTAAACCAGGTATGGCTGCCGATGGTTATCTTCCAGATTGGCTCGAGGACAACCTCTCTGAGGGCATTCGCGAGTGGTGGGACTTGAAACCTGGAGCCCCGAAACCCAAAGCCAACCAGCAAAAGCAGGACGACGGCCGGGGTCTGGTGCTTCCTGGCTACAAGTACCTCGGACCCTTCAACGGACTCGACAAGGGAGAGCCGGTCAACGAGGCAGACGCCGCGGCCCTCGAGCACGACAAGGCCTACGACAAGCAGCTCGAGCAGGGGGACAACCCGTACCTCAAGTACAACCACGCCGACGCCGAGTTTCAGGAGCGTCTTCAAGAAGATACGTCTTTTGGGGGCAACCTCGGGCGAGCAGTCTTCCAGGCCAAGAAGCGGGTTCTCGAACCTCTCGGTCTGGTTGAGGAAGGCGCTAAGACGGCTCCTGGAAAGAAGAGACCCATAGAATCCCCCGACTCCTCCACGGGCATCGGCAAGAAAGGCCAGCAGCCCGCTAAAAAGAAGCTCAACTTTGGGCAGACTGGCGACTCAGAGTCAGTGCCCGACCCCCAACCTCTCGGAGAACCTCCCGCCGCGCCCTCAGGTCTGGGATCTGGTACAATGGCTGCAGGCGGTGGCGCACCAATGGCAGACAATAACGAAGGCGCCGACGGAGTGGGTAATGCCTCCGGAAATTGGCATTGCGATTCCACATGGCTGGGCGACAGAGTCATCACCACCAGCACCCGCACCTGGGCCCTGCCCACCTACAACAACCACCTCTACAAGCAGATATCAAGTCAGAGCGGGGCTACCAACGACAACCACTTCTTCGGCTACAGCACCCCCTGGGGCTATTTTGACTTCAACAGATTCCACTGCCACTTCTCACCACGTGACTGGCAGCGACTCATCAACAACAACTGGGGATTCCGGCCCAGAAAGCTGCGGTTCAAGTTGTTCAACATCCAGGTCAAGGAGGTCACGACGAACGACGGCGTTACGACCATCGCTAATAACCTTACCAGCACGATTCAGGTCTTCTCGGACTCGGAGTACCAACTGCCGTACGTCCTCGGCTCTGCGCACCAGGGCTGCCTCCCTCCGTTCCCTGCGGACGTGTTCATGATTCCTCAGTACGGATATCTGACTCTAAACAACGGCAGTCAGTCTGTGGGACGTTCCTCCTTCTACTGCCTGGAGTACTTTCCTTCTCAGATGCTGAGAACGGGCAATAACTTTGAATTCAGCTACACCTTTGAGGAAGTGCCTTTCCACAGCAGCTATGCGCACAGCCAGAGCCTGGACCGGCTGATGAATCCCCTCATCGACCAGTACCTGTACTACCTGGCCCGGACCCAGAGCACTACGGGGTCCACAAGGGAGCTGCAGTTCCATCAGGCTGGGCCCAACACCATGGCCGAGCAATCAAAGAACTGGCTGCCCGGACCCTGTTATCGGCAGCAGAGACTGTCAAAAAACATAGACAGCAACAACAACAGTAACTTTGCCTGGACCGGGGCCACTAAATACCATCTGAATGGTAGAAATTCATTAACCAACCCGGGCGTAGCCATGGCCACCAACAAGGACGACGAGGACCAGTTCTTTCCCATCAACGGAGTGCTGGTTTTTGGCGAAACGGGGGCTGCCAACAAGACAACGCTGGAAAACGTGCTAATGACCAGCGAGGAGGAGATCAAAACCACCAATCCCGTGGCTACAGAAGAATACGGTGTGGTCTCCAGCAACCTGCAATCGTCTACGGCCGGACCCCAGACACAGACTGTCAACAGCCAGGGGGCTCTGCCCGGCATGGTCTGGCAGAACCGGGACGTGTACCTGCAGGGTCCCATCTGGGCCAAAATTCCTCACACGGACGGCAACTTTCACCCGTCTCCCCTGATGGGCGGATTTGGACTCAAACACCCGCCTCCTCAAATTCTCATCAAAAACACCCCGGTACCTGCTAATCCTCCAGAGGTGTTTACTCCTGCCAAGTTTGCCTCATTTATCACGCAGTACAGCACCGGCCAGGTCAGCGTGGAGATCGAGTGGGAACTGCAGAAAGAAAACAGCAAACGCTGGAATCCAGAGATTCAGTACACCTCAAATTATGCCAAGTCTAATAATGTGGAATTTGCTGTCAACAACGAAGGGGTTTATACTGAGCCTCGCCCCATTGGCACCCGTTACCTCACCCGTAACCTGTAATTGCCTGTTAATCAATAAACCGGTTAATTCGTTTCAGTTGAACTTTGGTCTCTGCGAAGGGCGAATTC

SEQ ID NO: 90 - protein, 728 aa, Adeno-associated virus
MAADGYLPDWLEDNLSEGIREWWDLKPGAPKPKANQQKQDDGRGLVLPGYKYLGPFNGLDKGEPVNEADAAALEHDKAYDKQLEQGDNPYLKYNHADAEFQERLQEDTSFGGNLGRAVFQAKKRVLEPLGLVEEGAKTAPGKKRPIESPDSSTGIGKKGQQPAKKKLNFGQTGDSESVPDPQPLGEPPAAPSGLGSGTMAAGGGAPMADNNEGADGVGNASGNWHCDSTWLGDRVITTSTRTWALPTYNNHLYKQISSQSGATNDNHFFGYSTPWGYFDFNRFHCHFSPRDWQRLINNNWGFRPRKLRFKLFNIQVKEVTTNDGVTTIANNLTSTIQVFSDSEYQLPYVLGSAHQGCLPPFPADVFMIPQYGYLTLNNGSQSVGRSSFYCLEYFPSQMLRTGNNFEFSYTFEEVPFHSSYAHSQSLDRLMNPLIDQYLYYLARTQSTTGSTRELQFHQAGPNTMAEQSKNWLPGPCYRQQRLSKNIDSNNNSNFAWTGATKYHLNGRNSLTNPGVAMATNKDDEDQFFPINGVLVFGETGAANKTTLENVLMTSEEEIKTTNPVATEEYGVVSSNLQSSTAGPQTQTVNSQGALPGMVWQNRDVYLQGPIWAKIPHTDGNFHPSPLMGGFGLKHPPPQILIKNTPVPANPPEVFTPAKFASFITQYSTGQVSVEIEWELQKENSKRWNPEIQYTSNYAKSNNVEFAVNNEGVYTEPRPIGTRYLTRNL

SEQ ID NO: 91 - DNA, 2495 bp, Adeno-associated virus
  source 1..2495: mol_type = unassigned DNA
gaattcgccctttctacggctgcgtcaactagaccaatgagaactttcccttcaacgattgcgtcgacaagatggtgatctggtgggaggagggcaagatgacggccaaggtcgtggagtccgccaaggccattcatcatctgctggggcgggctcccgagattgcttgctcggcctgcgatctggtcaacgtggacctggatgactgtgtttctgagcaataaatgacttaaaccaggtatggctgccgatggttatcttccagattggctcgaggacaacctctctgagggcattcgcgagtggtgggacttgaaacctggagccccgaaacccaaagccaaccagcaaaagcaggacgacggccggggtctggtgcttcctggctacaagtacctcggacccttcaacggactcgacaagggagagccggtcaacgaggcagacgccgcggccctcgagcacgacaaggcctacgacaagcagctcgagcagggggacaacccgtacctcaagtacaaccacgccgacgccgagtttcaggagcgtcttcaagaagatacgtcttttgggggcaacctcgggcgagcagtcttccaggccaagaagcgggttctcgaacctctcggtctggttgaggaaggcgctaagacggctcctggaaagaagagacccatagaatcccccgactcctccacgggcatcggcaagaaaggccagcagcccgctaaaaagaagctcaactttgggcagactggcgactcagagtcagtgcccgaccctcaaccaatcggagaaccccccgcaggcccctctggtctgggatctggtacaatggctgcaggcggtggcgctccaatggcagacaataacgaaggcgccgacggagtgggtaatgcctccggaaattggcattgcgattccacatggctgggcgacagagtcatcaccaccagcacccgcacctgggccctgcccacctacaacaaccacctctacaagcagatatcaagtcagagcggggctaccaacgacaaccacttcttcggctacagcaccccctggggctattttgacttcaacagattccactgccacttctcaccacgtgactggcagcgactcatcaacaacaactggggattccggcccagaaagctgcggttcaagttgttcaacatccaggtcaaggaggtcacgacgaacgacggcgttacgaccatcgctaataaccttaccagcacgattcaggtcttctcggactcggagtaccaactgccgtacgtcctcggctctgcgcaccagggctgcctccctccgttccctgcggacgtgttcatgattcctcagtacggatatctgactctaaacaacggcagtcagtctgtgggacgttcctccttctactgcctggagtactttccttctcagatgctgagaacgggcaataactttgaattcagctacacctttgaggaagtgcctttccacagcagctatgcgcacagccagagcctggaccggctgatgaatcccctcatcgaccagtacctgtactacctggcccggacccagagcactacggggtccacaagggagctgcagttccatcaggctgggcccaacaccatggccgagcaatcaaagaactggctgcccggaccctgttatcggcagcagagactgtcaaaaaacatagacagcaacaacaccagtaactttgcctggaccggggccactaaataccatctgaatggtagaaattcattaaccaacccgggcgtagccatggccaccaacaaggacgacgaggaccagttctttcccatcaacggagtgctggtttttggcaaaacgggggctgccaacaagacaacgctggaaaacgtgctaatgaccagcgaggaggagatcaaaaccaccaatcccgtggctacagaacagtacggtgtggtctccagcaacctgcaatcgtctacggccggaccccagacacagactgtcaacagccagggggctctgcccggcatggtctggcagaaccgggacgtgtacctgcagggtcccatctgggccaaaattcctcacacggacggcaactttcacccgtctcccctgatgggcggatttggactcaaacacccgcctcctcaaattctcatcaaaaacaccccggtacctgctaatcctccagaggtgtttactcctgccaagtttgcctcatttatcacgcagtacagcaccggccaggtcagcgtggagatcgagtgggaactgcagaaagaaaacagcaaacgctggaatccagagattcagtacacctcaaattatgccaagtctaataatgtggaatttgctgtcaacaacgaaggggtttatactgagcctcgccccattggcacccgttacctcacccgtaacctgtaattgcctgttaatcaataaaccggttaattcgtttcagttgaactttggtctctgcgaagggcgaattc

SEQ ID NO: 92 - protein, 728 aa, Adeno-associated virus
MAADGYLPDWLEDNLSEGIREWWDLKPGAPKPKANQQKQDDGRGLVLPGYKYLGPFNGLDKGEPVNEADAAALEHDKAYDKQLEQGDNPYLKYNHADAEFQERLQEDTSFGGNLGRAVFQAKKRVLEPLGLVEEGAKTAPGKKRPIESPDSSTGIGKKGQQPAKKKLNFGQTGDSESVPDPQPIGEPPAGPSGLGSGTMAAGGGAPMADNNEGADGVGNASGNWHCDSTWLGDRVITTSTRTWALPTYNNHLYKQISSQSGATNDNHFFGYSTPWGYFDFNRFHCHFSPRDWQRLINNNWGFRPRKLRFKLFNIQVKEVTTNDGVTTIANNLTSTIQVFSDSEYQLPYVLGSAHQGCLPPFPADVFMIPQYGYLTLNNGSQSVGRSSFYCLEYFPSQMLRTGNNFEFSYTFEEVPFHSSYAHSQSLDRLMNPLIDQYLYYLARTQSTTGSTRELQFHQAGPNTMAEQSKNWLPGPCYRQQRLSKNIDSNNTSNFAWTGATKYHLNGRNSLTNPGVAMATNKDDEDQFFPINGVLVFGKTGAANKTTLENVLMTSEEEIKTTNPVATEQYGVVSSNLQSSTAGPQTQTVNSQGALPGMVWQNRDVYLQGPIWAKIPHTDGNFHPSPLMGGFGLKHPPPQILIKNTPVPANPPEVFTPAKFASFITQYSTGQVSVEIEWELQKENSKRWNPEIQYTSNYAKSNNVEFAVNNEGVYTEPRPIGTRYLTRNL

SEQ ID NO: 93 - DNA, 2504 bp, Adeno-associated virus
  source 1..2504: mol_type = unassigned DNA
gaattcgccctttctacggctgcgtcaactggaccaatgagaactttcccttcaacgattgcgtcgacaagatggtgatctggtgggaggagggcaagatgacggccaaggtcgtggagtccgccaaggccattcatcatctgctggggcgggctcccgagattgcttgctcggcctgcgatctggtcaacgtggacctggatgactgtgtttctgagcaataaatgacttaaaccaggtatggctgccgatggttatcttccagattggctcgaggacaacctctctgagggcattcgcgagtggtgggacttgaaacctggagccccgaaacccaaagccaaccagcaaaagcaggacgacggccggggtctggtgcttcctggctacaagtacctcggacccttcaacggactcgacaagggagagccggtcaacgaggcagacgccgcggccctcgagcacgacaaggcctacgacaagcagctcgagcagggggacaacccgtacctcaagtacaaccacgccgacgccgagtttcaggagcgtcttcaagaagatacgtcttttgggggcaacctcgggcgagcagtcttccaggccaagaagcgggttctcgaacctctcggtctggttgaggaaggcgctaagacggctcctggaaagaagagacccatagaatcccccgactcctccacgggcatcggcaagaaaggccagcagcccgctaaaaagaagctcaactttgggcagactggcgactcagagtcagtgcccgaccctcaaccaatcggagaaccccccgcaggcccctctggtctgggatctggtacaatggctgcaggcggtggcgctccaatggcagacaataacgaaggcgccgacggagtgggtaatgcctccggaaattggcattgcgattccacatggctgggcgacagagtcatcaccaccagcacccgcacctgggccctgcccacctacaacaaccacctctacaagcagatatcaagtcagagcggggctaccaacgacaaccacttcttcggctacagcaccccctggggctattttgacttcaacagattccactgccacttctcatcacgtgactggcagcgactcatcaacaacaactggggattccggcccaagagactcaacttcaagctcttcaacatccaggtcaaggaggtcacgcagaatgaaggcaccaagaccatcgccaataaccttaccagcacgattcaggtctttacggactcggaataccggctcccgtacgtcctcggctctgcgcaccagggctgcctgcctccgttcccggcggacgtcttcatgattcctcagtacgggtacctgactctgaacaacggcagtcaggccgtgggccgttcctccttctactgcctggagtactttccttctcaaatgctgagaacgggcaacaactttgagttcagctaccagtttgaggacgtgccttttcacagcagctacgcgcacagccaaagcctggaccggctgatgaaccccctcatcgaccagtacctgtactacctgtctcggactcagtccacgggaggtaccgcaggaactcagcagttgctattttctcaggccgggcctaataacatgtcggctcaggccaaaaactggctacccgggccctgctaccggcagcaacgcgtctccacgacactgtcgcaaaataacaacagcaactttgcttggaccggtgccaccaagtatcatctgaatggcagagactctctggtaaatcccggtgtcgctatggcaacgcacaaggacgacgaagagcgattttttccatccagcggagtcttgatgtttgggaaacagggagctggaaaagacaacgtggactatagcagcgttatgctaaccagtgaggaagaaatcaaaaccaccaacccagtggccacagaacagtacggcgtggtggccgataacctgcaacagcaaaacgccgctcctattgtaggggccgtcaacagtcaaggagccttacctggcatggtctggcagaaccgggacgtgtacctgcagggtcctatctgggccaagattcctcacacggacggcaactttcatccttcgccgctgatgggaggctttggactgaaacacccgcctcctcagatcctgattaagaatacacctgttcccgcggatcctccaactaccttcagtcaagccaagccggcgtcgttcatcacgcagtacagcaccggacaggtcagcgtggaaattgaatgggagctgcagaaagagaacagcaagcgctggaacccagagattcagtatacttccaactactacaaatctacaaatgtggactttgctgtcaatactgagggtacttattcagagcctcgccccattggcacccgttacctcacccgtaacctgtaattgcctgttaatcaataaaccggttaattcgtttcagttgaactttggtctctgcgaagggcgaattc

SEQ ID NO: 94 - protein, 731 aa, Adeno-associated virus
MAADGYLPDWLEDNLSEGIREWWDLKPGAPKPKANQQKQDDGRGLVLPGYKYLGPFNGLDKGEPVNEADAAALEHDKAYDKQLEQGDNPYLKYNHADAEFQERLQEDTSFGGNLGRAVFQAKKRVLEPLGLVEEGAKTAPGKKRPIESPDSSTGIGKKGQQPAKKKLNFGQTGDSESVPDPQPIGEPPAGPSGLGSGTMAAGGGAPMADNNEGADGVGNASGNWHCDSTWLGDRVITTSTRTWALPTYNNHLYKQISSQSGATNDNHFFGYSTPWGYFDFNRFHCHFSSRDWQRLINNNWGFRPKRLNFKLFNIQVKEVTQNEGTKTIANNLTSTIQVFTDSEYRLPYVLGSAHQGCLPPFPADVFMIPQYGYLTLNNGSQAVGRSSFYCLEYFPSQMLRTGNNFEFSYQFEDVPFHSSYAHSQSLDRLMNPLIDQYLYYLSRTQSTGGTAGTQQLLFSQAGPNNMSAQAKNWLPGPCYRQQRVSTTLSQNNNSNFAWTGATKYHLNGRDSLVNPGVAMATHKDDEERFFPSSGVLMFGKQGAGKDNVDYSSVMLTSEEEIKTTNPVATEQYGVVADNLQQQNAAPIVGAVNSQGALPGMVWQNRDVYLQGPIWAKIPHTDGNFHPSPLMGGFGLKHPPPQILIKNTPVPADPPTTFSQAKPASFITQYSTGQVSVEIEWELQKENSKRWNPEIQYTSNYYKSTNVDFAVNTEGTYSEPRPIGTRYLTRNL

SEQ ID NO: 95 - DNA, 3128 bp, Adeno-associated virus
  source 1..3128: mol_type = unassigned DNA
gaattcgccctttctacggctgcgtcaactggaccaatgagaactttcccttcaacgattgcgtcgacaagatggtgatctggtgggaggagggcaagatgacggccaaggtcgtggagtccgccaaggccattctcggcggcagcaaggtgcgcgtggaccaaaagtgcaagtcttccgcccagatcgatcccacccccgtgatcgtcacttccaacaccaacatgtgcgccgtgattgacgggaacagcaccaccttcgagcaccagcagccgttacaagaccggatgttcaaatttgaactcacccgccgtctggagcacgactttggcaaggtgacaaagcaggaagtcaaagagttcttccgctgggcgcaggatcacgtgaccgaggtggcgcatgagttctacgtcagaaagggtggagccaacaagagacccgcccccgatgacgcggataaaagcgagcccaagcgggcctgcccctcagtcgcggatccatcgacgtcagacgcggaaggagctccggtggactttgccgacaggtaccaaaacaaatgttctcgtcacgcgggcatgcttcagatgctgtttccctgcaagacatgcgagagaatgaatcagaatttcaacatttgcttcacgcacgggaccagagactgttcagaatgtttccccggcgtgtcagaatctcaaccggtcgtcagaaagaggacgtatcggaaactctgtgccattcatcatctgctagggcgggctcccgagattgcttgctcggcctgcgatctggtcaacgtggacctggatgactgtgtttctgagcaataaatgacttaaaccaggtatggctgccgatggttatcttccagattggctcgaggacaacctctctgagggcattcgcgagtggtgggacttgaaacctggagccccgaaacccaaagccaaccagcaaaagcaggacgacggccggggtctggtgcttcctggctacaagtacctcggacccttcaacggactcgacaagggggagcccgtcaacgcggcggacgcagcggccctcgagcacgacaaggcctacgaccagcagctcaaagcgggtgacaatccgtacctgcggtataaccacgccgacgccgagtttcaggagcgtctgcaagaagatacgtcttttgggggcaacctcgggcgagcagtcttccaggccaagaagcgggttctcgaacctctcggtctggttgaggaaggcgctaagacggctcctggaaagaagagaccggtagagccatcaccccagcgttctccagactcctctacgggcatcggcaagacaggccagcagcccgcgaaaaagagactcaactttgggcagactggcgactcagagtcagtgcccgaccctcaaccaatcggagaaccccccgcaggcccctctggtctgggatctggtacaatggctgcaggcggtggcgctccaatggcagacaataacgaaggcgccgacggagtgggtagttcctcaggaaattggcattgcgattccacatggctgggcgacagagtcatcaccaccagcacccgaacctgggccctccccacctacaacaaccacctctacaagcaaatctccaacgggacatcgggaggaagcaccaacgacaacacctacttcggctacagcaccccctgggggtattttgactttaacagattccactgccacttctcaccacgtgactggcagcgactcatcaacaacaactggggattccggcccaagagactcaacttcaagctcttcaacatccaggtcaaggaggtcacgcagaatgaaggcaccaagaccatcgccaataaccttaccagcacgattcaggtctttacggactcggaataccagctcccgtacgtcctcggctctgcgcaccagggctgcctgcctccgttcccggcggacgtcttcatgattcctcagtacgggtacctgactctgaacaacggcagtcaggccgtgggccgttcctccttctactgcctggagtactttccttctcaaatgctgagaacgggcaacaactttgagttcagctaccagtttgaggacgtgccttttcacagcagctacgcgcacagccaaagcctggaccggctgatgaaccccctcatcgaccagtacctgtactacctgtctcggactcagtccacgggaggtaccgcaggaactcagcagttgctattttctcaggccgggcctaataacatgtcggctcaggccaaaaactggctacccgggccctgctaccggcagcaacgcgtctccacgacactgtcgcaaaataacaacagcaactttgcttggaccggtgccaccaagtatcatctgaatggcagagactctctggtaaatcccggtgtcgctatggcaacgcacaaggacgacgaagagcgattttttccatccagcggagtcttgatgtttgggaaacagggagctggaaaagacaacgtggactatagcagcgttatgctaaccagtgaggaagaaatcaaaaccaccaacccagtggccacagaacagtacggcgtggtggccgataacctgcaacagcaaaacgccgctcctattgtaggggccgtcaacagtcaaggagccttacctggcatggtctggcagaaccgggacgtgtacctgcagggtcctatctgggccaagattcctcacacggacggcaactttcatccttcgccgctgatgggaggctttggactgaaacacccgcctcctcagatcctgattaagaatacacctgttcccgcggatcctccaactaccttcagtcaagccaagctggcgtcgttcatcacgcagtacagcaccggacaggtcagcgtggaaattgaatgggagctgcagaaagagaacagcaagcgctggaacccagagattcagtatacttccaactactacaaatctacaaatgtggactttgctgtcaatactgagggtacttattcagagcctcgccccattggcacccgttacctcacccgtaacctgtaattgcctgttaatcaataaaccggctaattcgtttcagttgaactttggtctctgcgaagggcgaattc

SEQ ID NO: 96 - protein, 738 aa, Adeno-associated virus
MAADGYLPDWLEDNLSEGIREWWDLKPGAPKPKANQQKQDDGRGLVLPGYKYLGPFNGLDKGEPVNAADAAALEHDKAYDQQLKAGDNPYLRYNHADAEFQERLQEDTSFGGNLGRAVFQAKKRVLEPLGLVEEGAKTAPGKKRPVEPSPQRSPDSSTGIGKTGQQPAKKRLNFGQTGDSESVPDPQPIGEPPAGPSGLGSGTMAAGGGAPMADNNEGADGVGSSSGNWHCDSTWLGDRVITTSTRTWALPTYNNHLYKQISNGTSGGSTNDNTYFGYSTPWGYFDFNRFHCHFSPRDWQRLINNNWGFRPKRLNFKLFNIQVKEVTQNEGTKTIANNLTSTIQVFTDSEYQLPYVLGSAHQGCLPPFPADVFMIPQYGYLTLNNGSQAVGRSSFYCLEYFPSQMLRTGNNFEFSYQFEDVPFHSSYAHSQSLDRLMNPLIDQYLYYLSRTQSTGGTAGTQQLLFSQAGPNNMSAQAKNWLPGPCYRQQRVSTTLSQNNNSNFAWTGATKYHLNGRDSLVNPGVAMATHKDDEERFFPSSGVLMFGKQGAGKDNVDYSSVMLTSEEEIKTTNPVATEQYGVVADNLQQQNAAPIVGAVNSQGALPGMVWQNRDVYLQGPIWAKIPHTDGNFHPSPLMGGFGLKHPPPQILIKNTPVPADPPTTFSQAKLASFITQYSTGQVSVEIEWELQKENSKRWNPEIQYTSNYYKSTNVDFAVNTEGTYSEPRPIGTRYLTRNL

SEQ ID NO: 97 - DNA, 3084 bp, Adeno-associated virus
  source 1..3084: mol_type = unassigned DNA
gaattcgccctttctacggctgcatcaactggaccaatgagaactttcccttcaacgattgcgtcgacaagatggtgatctggtgggaggagggcaagatgacggccaaggtcgtggagtccgccaaggccattctcggcggcagcaaggtgcgcgtggaccaaaagtgcaagtcgtccgcccagatcgaccccacccccgtgatcgtcacctccaacaccaacatgtgcgccgtgattgacgggaacagcaccaccttcgagcaccagcagccgttgcaggaccggatgttcaagttcgaactcacccgccgtctggagcacgactttggcaaggtgaccaagcaggaagtcaaagagttcttccgctgggcgcaggatcacgtgaccgaggtggcgcatgagttctacgtcagaaagggcggagccagcaaaagacccgcccccgatgacgcggatataagcgagcccaagcgggcctgcccctcagtcgcggatccatcgacgtcagacgcggaaggagctccggtggactttgccgacaggtaccaaaacaaatgttctcgtcacgcgggcatgcttcagatgctgtttccctgcaaaacgtgcgagaaaatgaatcagaatttcaacatttgcttcacgcacggggtcagagactgctcagaatgtttccccggtgcatcagaatctcaaccggtcgtcagaaaaaaaacgtatcagaaactgtgtgccattcatcatctgctggggcgggcacccgagattgcttgctcggcctgcgatctggtcaacgtggacctggacgactgtgtttctgagcaataaatgacttaaaccaggtatggctgccgatggttatcttccagattggcttgaggacaacctctctgagggcattcgcgagtggtgggacctgaaacctggagccccgaaacccaaagccaaccagcaaaagcaggacgacggccggggtctggtgcttcctggctacaagtacctcggacccttcaacggactcgacaagggggagcccgtcaacgcggcggacgcagcggccctcgagcacgacaaggcctacgaccagcagctcaaagcgggtgacaatccgtacctgcggtataaccacgccgacgccgagtttcaggagcgtctgcaagaagatacgtcttttgggggcaacctcgggcgagcagtcttccaggccaagaagcgggttctcgaacctctcggtctggttgaggaaggcgctaagacggctcctggaaagaagagaccggtagagccatcacctcagcgttcccccgactcctccacgggcatcggcaagaaaggccaccagcccgcgagaaagagactgaactttgggcagactggcgactcggagtcagtccccgaccctcaaccaatcggagaaccaccagcaggcccctctggtctgggatctggtacaatggctgcaggcggtggcgctccaatggcagacaataacgaaggcgccgacggagtgggtagttcctcaggaaattggcattgcgattccacatggctgggcgacagagtcatcaccaccagcacccgaacctgggccctgcccacctacaacaaccatctctacaagcaaatctccaacgggacatcgggaggaagcactaacgacaacacctactttggctacagcaccccctgggggtattttgacttcaacagattccactgccacttctcaccacgtgactggcagcgactcatcaacaataactggggattccggcccaagagactcaacttcaagctcttcaacatccaggtcaaggaggtcacgcagaatgaaggcaccaagaccatcgccaataaccttaccagcacgattcaggtgtttacggactcggaataccagctcccgtacgtccccggctctgcgcaccagggctgcctccctccgttcccggcggacgtcttcatgattcctcagtacgggtatctgaccctaaacaatggcagtcaggctgtgggccgttcctccttctactgcctggaatacttcccttctcaaatgctgaggacgggcaacaactttgaattcagctacaccttcgaggacgtgcctttccacagcagctacgcgcacagccagagcctggaccggctgatgaaccctctcatcgaccagtacctgtattacttatccagaactcagtccacaggaggaactcaaggtactcagcaattgttattttctcaagccgggcccgcaaacatgtcggctcaggccaagaactggctacctggaccgtgttaccgtcagcaacgagtttccacgacactgtcgcaaaacaacaacagcaattttgcttggaccggtgccaccaagtatcacctgaatggcagagactccctggttaatcccggcgttgccatggctacccacaaggacgacgaggagcgcttcttcccgtcaagcggagttctaatgtttggcaagcagggggctggaaaagacaatgtggactacagcagcgtgatgctcaccagcgaagaagaaattaaaactactaacccagtggctacagagcagtatggtgtggtggcagacaacctgcagcagaccaacggagctcccattgtgggaactgtcaacagccagggggccttacctggtatggtctggcaaaaccgggacgtgtacctgcagggccccatctgggccaaaattcctcacacggacggcaactttcatccttcgccgctgatgggaggctttggactgaaacacccgcctcctcagatcctggtgaaaaacactcctgttcctgcggatcctccgaccaccttcagccaggccaagctggcttcttttatcacgcagtacagcaccggacaggtcagcgtggaaatcgaatgggagctgcagaaagaaaacagcaagcgctggaacccagagattcagtatacttccaactactacaaatctacaaatgtggactttgctgtcaatactgagggtacttattcagagcctcgccccattggcactcgttatctcacccgtaatctgtaattgcttgttaatcaataaaccggt

SEQ ID NO: 98 - protein, 738 aa, Adeno-associated virus
MAADGYLPDWLEDNLSEGIREWWDLKPGAPKPKANQQKQDDGRGLVLPGYKYLGPFNGLDKGEPVNAADAAALEHDKAYDQQLKAGDNPYLRYNHADAEFQERLQEDTSFGGNLGRAVFQAKKRVLEPLGLVEEGAKTAPGKKRPVEPSPQRSPDSSTGIGKKGHQPARKRLNFGQTGDSESVPDPQPIGEPPAGPSGLGSGTMAAGGGAPMADNNEGADGVGSSSGNWHCDSTWLGDRVITTSTRTWALPTYNNHLYKQISNGTSGGSTNDNTYFGYSTPWGYFDFNRFHCHFSPRDWQRLINNNWGFRPKRLNFKLFNIQVKEVTQNEGTKTIANNLTSTIQVFTDSEYQLPYVPGSAHQGCLPPFPADVFMIPQYGYLTLNNGSQAVGRSSFYCLEYFPSQMLRTGNNFEFSYTFEDVPFHSSYAHSQSLDRLMNPLIDQYLYYLSRTQSTGGTQGTQQLLFSQAGPANMSAQAKNWLPGPCYRQQRVSTTLSQNNNSNFAWTGATKYHLNGRDSLVNPGVAMATHKDDEERFFPSSGVLMFGKQGAGKDNVDYSSVMLTSEEEIKTTNPVATEQYGVVADNLQQTNGAPIVGTVNSQGALPGMVWQNRDVYLQGPIWAKIPHTDGNFHPSPLMGGFGLKHPPPQILVKNTPVPADPPTTFSQAKLASFITQYSTGQVSVEIEWELQKENSKRWNPEIQYTSNYYKSTNVDFAVNTEGTYSEPRPIGTRYLTRNL

SEQ ID NO: 99 - DNA, 3123 bp, Adeno-associated virus
  source 1..3123: mol_type = unassigned DNA
gaattcgcccttggctgcgtcaactggaccaatgagaactttcccttcaacgattgcgtcgacaagatggtgatctggtgggaggagggcaagatgacggccaaggtcgtggagtccgccaaggccattctcggcggcagcaaggtgcgcgtggaccaaaagtgcaagtcgtccgcccagatcgaccccacccccgtgatcgtcacctccaacaccaacatgtgcgccgtgattgacgggaacagcaccaccttcgagcaccagcagccgttgcaggaccggatgttcaagttcgaactcacccgccgtctggagcacgactttggcaaggtgaccaagcaggaagtcaaagagttcttccgctgggcgcaggatcacgtgaccgaggtggcgcatgagttctacgtcagaaagggcggagccagcaaaagacccgcccccgatgacgcggatataagcgagcccaagcgggcctgcccctcagtcgcggatccatcgacgtcagacgcggaaggagctccggtggactttgccgacaggtaccaaaacaaatgttctcgtcacgcgggcatgctccagatgctgtttccctgcaaaacgtgcgagagaatgaatcagaatttcaacatttgcttcacgcacggggtcagagactgctcagaatgtttccccggtgcatcagaatctcaaccggtcgtcagaaaaaaaacgtatcagaaactgtgtgccattcatcatctgctggggcgggcacccgagattgcttgctcggcctgcgatctggtcaacgtggacctggacgactgtgtttctgagcaataaatgacttaaaccaggtatggctgccgatggttatcttccagattggcttgaggacaacctctctgagggcattcgcgagtggtgggacctgaaacctggagccccgaaacccaaagccaaccagcaaaagcaggacgacggccggggtctggtgcttcctggctacaagtacctcggacccttcaacggactcgacaagggggagcccgtcaacgcggcggacgcagcggccctcgagcacgacaaggcctacgaccagcagctcaaagcgggtgacaatccgtacctgcggtataaccacgccgacgccgagtttcaggagcgtctgcaagaagatacgtcttttgggggcaacctcgggcgagcagtcttccaggccaagaagcgggttctcgaacctctcggtctggttgaggaaggcgctaagacggctcctggaaagaagagaccggtagagccatcacctcagcgttcccccgactcctccacgggcatcggcaagaaaggccaccagcccgcgagaaagagactgaactttgggcagactggcgactcggagtcagtccccgaccctcaaccaatcggagaaccaccagcaggcccctctggtctgggatctggtacaatggctgcaggcggtggcgctccaatggcagacaataacgaaggcgccgacggagtgggtagttcctcaggaaattggcattgcgattccacatggctgggcgacagagtcatcaccaccagcacccgaacctgggccctgcccacctacaacaaccatctctacaagcaaatctccaacgggacatcgggaggaagcactaacgacaacacctactttggctacagcaccccctgggggtattttgacttcaacagattccactgccacttctcaccacgtgactggcagcgactcatcaacaataactggggattccggcccaagagactcaacttcaagctcttcaacatccaggtcaaggaggtcacgcagaatgaaggcaccaagaccatcgccaataaccttaccagcacgattcaggtgtttacggactcggaataccagctcccgtacgtcctcggctctgcgcaccagggctgcctccctccgttcccggcggacgtcttcatgattcctcagtacgggtatctgaccctaaacaatggcagtcaggctgtgggccgttcctccttctactgcctggaatacttcccttctcaaatgctgaggacgggcaacaactttgaattcagctacaccttcgaggacgtgcctttccacagcagctacgcgcacagccagagcctggaccggctgatgaaccctctcatcgaccagtacctgtattacttatccagaactcagtccacaggaggaactcaaggtactcagcaattgttattttctcaagccgggcccgcaaacatgtcggctcaggccaagaactggctacctggaccgtgttaccgtcagcaacgagtttccacgacactgtcgcaaaacaacaacagcaattttgcttggaccggtgccaccaagtatcacctgaatggcagagactccctggttaatcccggcgttgccatggctacccacaaggacgacgaggagcgcttcttcccgtcaagcggagttctaatgtttggcaagcagggggctggaaaagacaatgtggactacagcagcgtgatgctcaccagcgaagaagaaattaaaactactaacccagtggctacagagcagtatggtgtggtggcagacaacctgcagcagaccaacggagctcccattgtgggaactgtcaacagccagggggccttacctggtatggtctggcaaaaccgggacgtgtacctgcagggccccatctgggccaaaattcctcacacggacggcaactttcatccttcgccgctgatgggaggctttggactgaaacacccgcctcctcagatcctggtgaaaaacactcctgttcctgcggatcctccgaccaccttcagccaggccaagctggcttcttttatcacgcagtacagcaccggacaggtcagcgtggaaatcgaatgggagctgcagaaagaaaacagcaagcgctggaacccagagattcagtatacttccaactactacaaatctacaaatgtggactttgctgtcaatactgagggtacttattcagagcctcgccccattggcactcgttatctcacccgtaatctgtaattgcttgttaatcaataaaccggttaattcgtttcagttgaactttggtctctgcgaagggcgaattc

SEQ ID NO: 100 - protein, 738 aa, Adeno-associated virus
MAADGYLPDWLEDNLSEGIREWWDLKPGAPKPKANQQKQDDGRGLVLPGYKYLGPFNGLDKGEPVNAADAAALEHDKAYDQQLKAGDNPYLRYNHADAEFQERLQEDTSFGGNLGRAVFQAKKRVLEPLGLVEEGAKTAPGKKRPVEPSPQRSPDSSTGIGKKGHQPARKRLNFGQTGDSESVPDPQPIGEPPAGPSGLGSGTMAAGGGAPMADNNEGADGVGSSSGNWHCDSTWLGDRVITTSTRTWALPTYNNHLYKQISNGTSGGSTNDNTYFGYSTPWGYFDFNRFHCHFSPRDWQRLINNNWGFRPKRLNFKLFNIQVKEVTQNEGTKTIANNLTSTIQVFTDSEYQLPYVLGSAHQGCLPPFPADVFMIPQYGYLTLNNGSQAVGRSSFYCLEYFPSQMLRTGNNFEFSYTFEDVPFHSSYAHSQSLDRLMNPLIDQYLYYLSRTQSTGGTQGTQQLLFSQAGPANMSAQAKNWLPGPCYRQQRVSTTLSQNNNSNFAWTGATKYHLNGRDSLVNPGVAMATHKDDEERFFPSSGVLMFGKQGAGKDNVDYSSVMLTSEEEIKTTNPVATEQYGVVADNLQQTNGAPIVGTVNSQGALPGMVWQNRDVYLQGPIWAKIPHTDGNFHPSPLMGGFGLKHPPPQILVKNTPVPADPPTTFSQAKLASFITQYSTGQVSVEIEWELQKENSKRWNPEIQYTSNYYKSTNVDFAVNTEGTYSEPRPIGTRYLTRNL

SEQ ID NO: 101 - DNA, 3122 bp, Adeno-associated virus
  source 1..3122: mol_type = unassigned DNA
gaattcgccctttctacggctgcgtcaactggaccaatgagaactttcccttcaacgattgcgtcgacaagatggtgatctggtgggaggagggcaagatgacggccaaggtcgtggagtccgccaaggccattctcggcggcagcaaggtgcgtgtggaccaaaagtgcaagtcttccgcccagatcgatcccacccccgtgatcgtcacctccaacaccaacatgtgcgccgtgattgacgggaacagcgccaccttcgagcaccagcagccgttgcaggaccggatgttcaaatttgaactcacccgccgtctggagcatgactttggcaaggtgacgaagcaggaagtcaaagagttcttccgctgggcgcaggatcacgtgaccgaggtggcgcatgagttccacgtcagaaagggtggagccaacaagagacccgcccccgatgacgcggatataagcgagcccaagcgggcctgcccctcagtcgcggatccatcgacgtcagacgcggaaggagctccggtggactttgccgacaggtaccaaaacaaatgttctcgtcacgcgggcatgcttcagatgctgtttccctgcaagacatgcgagagaatgaatcagaatttcaacatttgcttcacgcacgggaccagagactgttcagaatgtttccccggcgtgtcagaatctcaaccggtcgtcagaaagaggacgtatcggaaactctgtgcgattcatcatctgctggggcgggctcccgagattgcttgctcggcctgcgatctggtcaacgtggacctggatgactgtgtttctgagcaataaatgacttaaaccaggtatggctgccgatggttatcttccagattggctcgaggacaacctctctgagggcattcgcgagtggtgggacttgaaacctggagccccgaaacccaaagccaaccagcaaaagcaggacgacggccggggtctggtgcttcctggctacaagtacctcggacccttcaacggactcgacaagggggagcccgtcaacgcggcggacgcagcggccctcgagcacgacaaagcctacgaccagcagctcaaagcgggtgacaatccgtacctgcggtataatcacgccgacgccgagtttcaggagcgtctgcaagaagatacgtcttttgggggcaacctcgggcgagcagtcttccaggccaagaagcgggttctcgaacctctcggtctggttgaggaaggcgctaagacggctcctggaaagaagagactggtagagcagtcgccacaagagccagactcctcctcgggcatcggcaagacaggccagcagcccgctaaaaagagactcaattttggtcagactggcgactcagagtcagtccccgacccacaacctctcggagaacctccagcagccccctcaggtctgggacctaatacaatggcttcaggcggtggcgctccaatggcagacaataacgaaggcgccgacggagtgggtaattcctcgggaaattggcattgcgattccacatggctgggggacagagtcatcaccaccagcacccgaacctgggccctgcccacctacaacaaccacctctacaagcaaatctccaacggcacctcgggaggaagcaccaacgacaacacctattttggctacagcaccccctgggggtattttgacttcaacagattccactgtcacttttcaccacgtgactggcaacgactcatcaacaacaattggggattccggcccaaaagactcaacttcaagctgttcaacatccaggtcaaggaagtcacgacgaacgaaggcaccaagaccatcgccaataatctcaccagcaccgtgcaggtctttacggactcggagtaccagttaccgtacgtgctaggatccgctcaccagggatgtctgcctccgttcccggcggacgtcttcacggttcctcagtacggctatttaactttaaacaatggaagccaagccctgggacgttcctccttctactgtctggagtatttcccatcgcagatgctgagaaccggcaacaactttcagttcagctacaccttcgaggacgtgcctttccacagcagctacgcgcacagccagagcctggacaggctgatgaatcccctcatcgaccagtacctgtactacctggtcagaacgcaaacgactggaactggagggacgcagactctggcattcagccaagcgggtcctagctcaatggccaaccaggctagaaattgggtgcccggaccttgctaccggcagcagcgcgtctccacgacaaccaaccagaacaacaacagcaactttgcctggacgggagctgccaagtttaagctgaacggccgagactctctaatgaatccgggcgtggcaatggcttcccacaaggatgacgacgaccgcttcttcccttcgagcggggtcctgatttttggcaagcaaggagccgggaacgatggagtggattacagccaagtgctgattacagatgaggaagaaatcaaggctaccaaccccgtggccacagaagaatatggagcagtggccatcaacaaccaggccgccaatacgcaggcgcagaccggactcgtgcacaaccagggggtgattcccggcatggtgtggcagaatagagacgtgtacctgcagggtcccatctgggccaaaattcctcacacggacggcaactttcacccgtctcccctgatgggcggctttggactgaagcacccgcctcctcaaattctcatcaagaacacaccggttccagcggacccgccgcttaccttcaaccaggccaagctgaactctttcatcacgcagtacagcaccggacaggtcagcgtggaaatcgagtgggagctgcagaaagaaaacagcaaacgctggaatccagagattcaatacacttccaactactacaaatctacaaatgtggactttgctgtcaacacggaaggagtttatagcgagcctcgccccattggcacccgttacctcacccgcaacctgtaattacatgttaatcaataaaccggttaattcgtttcagttgaactttggtctctgcgaagggcgaattc

SEQ ID NO: 102 - protein, 736 aa, Adeno-associated virus
MAADGYLPDWLEDNLSEGIREWWDLKPGAPKPKANQQKQDDGRGLVLPGYKYLGPFNGLDKGEPVNAADAAALEHDKAYDQQLKAGDNPYLRYNHADAEFQERLQEDTSFGGNLGRAVFQAKKRVLEPLGLVEEGAKTAPGKKRLVEQSPQEPDSSSGIGKTGQQPAKKRLNFGQTGDSESVPDPQPLGEPPAAPSGLGPNTMASGGGAPMADNNEGADGVGNSSGNWHCDSTWLGDRVITTSTRTWALPTYNNHLYKQISNGTSGGSTNDNTYFGYSTPWGYFDFNRFHCHFSPRDWQRLINNNWGFRPKRLNFKLFNIQVKEVTTNEGTKTIANNLTSTVQVFTDSEYQLPYVLGSAHQGCLPPFPADVFTVPQYGYLTLNNGSQALGRSSFYCLEYFPSQMLRTGNNFQFSYTFEDVPFHSSYAHSQSLDRLMNPLIDQYLYYLVRTQTTGTGGTQTLAFSQAGPSSMANQARNWVPGPCYRQQRVSTTTNQNNNSNFAWTGAAKFKLNGRDSLMNPGVAMASHKDDDDRFFPSSGVLIFGKQGAGNDGVDYSQVLITDEEEIKATNPVATEEYGAVAINNQAANTQAQTGLVHNQGVIPGMVWQNRDVYLQGPIWAKIPHTDGNFHPSPLMGGFGLKHPPPQILIKNTPVPADPPLTFNQAKLNSFITQYSTGQVSVEIEWELQKENSKRWNPEIQYTSNYYKSTNVDFAVNTEGVYSEPRPIGTRYLTRNL

SEQ ID NO: 103 - DNA, 3117 bp, Adeno-associated virus
  source 1..3117: mol_type = unassigned DNA
gaattcgcccttggctgcgtcaactggaccaatgagaactttcccttcaacgattgcgtcgacaagatggtgatctggtgggaggagggcaagatgacggccaaggtcgtggagtccgccaaggccattctcggcggcagcaaggtgcgtgtggaccaaaagtgcaagtcttccgcccagatcgatcccacccccgtgatcgtcacctccaacaccaacatgtgcgccgtgattgacgggaacagcaccaccttcgagcaccagcagccgttgcaggaccggatgttcaaatttgaactcacccgccgtctggagcatgactttggcaaggtgacgaagcaggaagtcaaagagttcttccgctgggcgcaggatcacgtgaccgaggtggcgcatgagttccacgtcagaaagggtggagccaacaagagacccgcccccgatgacgcggatataagcgagcccaagcgggcctgcccctcagtcgcggatccatcgacgtcagacgcggaaggagctccggtggactttgccgacaggtaccaaaacaaatgttctcgtcacgcgggcatgcttcagatgctgtttccctgcaagacatgcgagagaatgaatcagaatttcaacatttgcttcacgcacgggaccagagactgttcagaatgtttccccggcgtgtcagaatctcaaccggtcgtcagaaagaggacgtatcggaaactctgtgcgattcatcatctgctggggcgggctcccgagattgcttgctcggcctgcgatctggtcaacgtggacctggatgactgtgtttctgagcaataaatgacttaaaccaggtatggctgccgatggttatcttccagattggctcgaggacaacctctctgagggcattcgcgagtggtgggacttgaaacctggagccccgaaacccaaagccaaccagcaaaagcaggacgacggccggggtctggtgcttcctggctacaagtacctcggacccttcaacggactcgacaagggggagcccgtcaacgcggcggacgcagcggccctcgagcacgacaaagcctacgaccagcagctcaaagcgggtgacaatccgtacctgcggtataatcacgccgacgccgagtttcaggagcgtctgcaagaagatacgtcttttgggggcaacctcgggcgagcagtcttccaggccaagaagcgggttctcgaacctctcggtctggttgaggaaggcgctaagacggctcctggaaagaagagaccggtagagcagtcgccacaagagccagactcctcctcgggcatcggcaagacaggccagcagcccgctaaaaagagactcaattttggtcagactggcgactcagagtcagtccccgacccacaacctctcggagaacctccagcagccccctcaggtctgggacctaatacaatggcttcaggcggtggcgctccaatggcagacaataacgaaggcgccgacggagtgggtaattcctcgggaaattggcattgcgattccacatggctgggggacagagtcatcaccaccagcacccgaacctgggccctgcccacctacaacaaccacctctacaagcaaatctccaacggcacctcgggaggaagcaccaacgacaacacctattttggctacagcaccccctgggggtattttgacttcaacagattccactgtcacttttcaccacgtgactggcaacgactcatcaacaacaattggggattccggcccaaaagactcaacttcaagctgttcaacatccaggtcaaggaagtcacgacgaacgaaggcaccaagaccatcgccaataatctcaccagcaccgtgcgggtctttacggactcggagtaccagttaccgtacgtgctaggatccgctcaccagggatgtctgcctccgttcccggcggacgtcttcatggttcctcagtacggctatttaactttaaacaatggaagccaagccctgggacgttcctccttctactgtctggagtatttcccatcgcagatgctgagaaccggcaacaactttcagttcagctacaccttcgaggacgtgcctttccacagcagctacgcgcacagccagagcctggacaggctgatgaatcccctcatcgaccagtacctgtactacctggtcagaacgcaaacgactggaactggagggacgcagactctggcattcagccaagcgggtcctagctcaatggccaaccaggctagaaattgggtgcccggaccttgctaccggcagcagcgcgtctccacgacaaccaaccagagcaacaacagcaactttgcctggacgggagctgccaagtttaagctgaacggccgagactctctaatgaatccgggcgtggcaatggcttcccacaaggatgacgacgaccgcttcttcccttcgagcggggtcctgatttttggcaagcaaggagccgggaacgatggagtggattacagccaagtgctgattacagatgaggaagaaatcaaggctaccaaccccgtggccacagaagaatatggagcagtggccatcaacaaccaggccgccaatacgcaggcgcagaccggactcgtgcacaaccagggggtgattcccggcatggtgtggcagaatagagacgtgtacctgcagggtcccatctgggccaaaattcctcacacggacggcaactttcacccgtctcccctgatgggcggctttggactgaagcacccgcctcctcaaattctcatcaagaacacaccggttccagcggacccgccgcttaccttcaaccaggccaagctgaactctttcatcacgcagtacagcaccggacaggtcagcgtggaaatcgagtgggagctgcagaaagaaaacagcaaacgctggaatccagagattcaatacacttccaactactacaaatctacaaatgtggactttgctgtcaacacggaaggagtttatagcgagcctcgccccattggcacccgttacctcacccgcaacctgtaattacatgttaatcaataaaccggttaattcgtttcagttgaactttggtctctgcgaagggcgaattc

SEQ ID NO: 104 - protein, 736 aa, Adeno-associated virus
MAADGYLPDWLEDNLSEGIREWWDLKPGAPKPKANQQKQDDGRGLVLPGYKYLGPFNGLDKGEPVNAADAAALEHDKAYDQQLKAGDNPYLRYNHADAEFQERLQEDTSFGGNLGRAVFQAKKRVLEPLGLVEEGAKTAPGKKRPVEQSPQEPDSSSGIGKTGQQPAKKRLNFGQTGDSESVPDPQPLGEPPAAPSGLGPNTMASGGGAPMADNNEGADGVGNSSGNWHCDSTWLGDRVITTSTRTWALPTYNNHLYKQISNGTSGGSTNDNTYFGYSTPWGYFDFNRFHCHFSPRDWQRLINNNWGFRPKRLNFKLFNIQVKEVTTNEGTKTIANNLTSTVRVFTDSEYQLPYVLGSAHQGCLPPFPADVFMVPQYGYLTLNNGSQALGRSSFYCLEYFPSQMLRTGNNFQFSYTFEDVPFHSSYAHSQSLDRLMNPLIDQYLYYLVRTQTTGTGGTQTLAFSQAGPSSMANQARNWVPGPCYRQQRVSTTTNQSNNSNFAWTGAAKFKLNGRDSLMNPGVAMASHKDDDDRFFPSSGVLIFGKQGAGNDGVDYSQVLITDEEEIKATNPVATEEYGAVAINNQAANTQAQTGLVHNQGVIPGMVWQNRDVYLQGPIWAKIPHTDGNFHPSPLMGGFGLKHPPPQILIKNTPVPADPPLTFNQAKLNSFITQYSTGQVSVEIEWELQKENSKRWNPEIQYTSNYYKSTNVDFAVNTEGVYSEPRPIGTRYLTRNL

SEQ ID NO: 105 - DNA, 3121 bp, Adeno-associated virus
  source 1..3121: mol_type = unassigned DNA
gaattcgcccttctacggctgcgtcaactggaccaatgagaactttcccttcaacgattgcgtcgacaagatggtgatctggtgggaggagggcaagatgacggccaaggtcgtggagtccgccaaggccattctcggcggcagcaaggtgcgtgtggaccaaaagtgcaagtcttccgcccagatcgatcccacccccgtgatcgtcacctccaacaccaacatgtgcgccgtgattgacgggaacagcaccaccttcgagcaccagcagccgttgcaggaccggatgttcaaatttgaactcacccgccgtctggagcatgactttggcaaggtgacgaagcaggaagtcaaagagttcttccgctgggcgcaggatcacgtgaccgaggtggcgcatgagttccacgtcagaaagggtggcgccaacaagagacccgcccccgatgacgcggatataagcgagcccaagcgggcctgcccctcagtcgcggatccatcgacgtcagacgcggaaggagctccggtggactttgccgacaggtaccaaaacaaatgttctcgtcacgcgggcatgcttcagatgctgtttccctgcaagacatgcgagagaatgaatcagaatttcaacatttgcttcacgcacgggaccagagactgttcagaatgtttccccggcgtgtcagaatctcaaccggtcgtcagaaagaggacgtatcggaaactctgtgcgattcatcatctgctggggcgggctcccgagattgcttgctcggcctgcgatctggtcaacgtggacctggatgactgtgtttctgagcaataaatgacttaaaccaggtatggctgccgatggttatcttccagattggctcgaggacaacctctctgagggcattcgcgagtggtgggacttgaaacctggagccccgaaacccaaagccaaccagcaaaagcaggacgacggccggggtctggtgcttcctggctacaagtacctcggacccttcaacggactcgacaagggggagcccgtcaacgcggcggacgcagcggccctcgagcacgacaaagcctacgaccagcagctcaaagcgggtgacaatccgtacctgcggtataatcacgccgacgccgagtttcaggagcgtctgcaagaagatacgtcctttgggggcaacctcgggcgagcagtcttccaggccaagaagcgggttctcgaacctctcggtctggttgaggaaggcgctaagacggctcctggaaagaagagaccggtagagcagtcgccacaagagccagactcctcctcgggcatcggcaagacaggccagcagcccgctaaaaagagactcaattttggtcagactggcgactcagagtcagtccccgacccacaacctctcggagaacctccagcagccccctcaggtctgggacctaatacaatggcttcaggcggtggcgctccaatggcagacaataacgaaggcgccgacggagtgggtaattcctcgggaaattggcattgcgattccacatggctgggggacagagtcatcaccaccagcacccgaacctgggccctgcccacctacaacaaccacctctacaagcaaatctccaacggcacctcgggaggaagcaccaacgacaacacctattttggctacagcaccccctgggggtattttgacttcaacagattccactgtcacttttcaccacgtgactggcaacgactcatcaacaacaattggggattccggcccaaaagactcaacttcaagctgttcaacatccaggtcaaggaagtcacgacgaacgaaggcaccaagaccatcgccaataatctcaccagcaccgtgcaggtctttacggacttggagtaccagttaccgtacgtgctaggatccgctcaccagggatgtctgcctccgttcccggcggacgtcttcatggttcctcagtacggctatttaactttaaacaatggaagccaagccctgggacgttcctccttctactgtctggagtatttcccatcgcagatgccgagaaccggcaacaactttcagttcagctacaccttcgaggacgtgcctttccacagcagctacgcgcacagccagagcctggacaggctgatgaatcccctcatcgaccagtacctgtactacctggtcagaacgcaaacgactggaactggagggacgcagactctggcattcagccaagcgggtcctagctcaatggccaaccaggctagaaattgggtgcccggaccttgctaccggcagcagcgcgtctccacgacaaccaaccagaacaacaacagcaactttgcctggacgggagctgccaagtttaagctgaacggccgagactctctaatgaatccgggcgtggcaatggcttcccacaaggatgacgacgaccgcttcttcccttcgagcggggtcctgatttttggcaagcaaggagccgggaacgatggagtggattacagccaagtgctgattacagatgaggaagaaatcaaggctaccaaccccgtggccacagaagaatatggagcagtggccatcaacaaccaggccgccaatacgcaggcgcagaccggactcgtgcacaaccagggggtgattcccggcatggtgtggcagaatagagacgtgtacctgcagggtcccatctgggccaaaattcctcacacggacggcaactttcacccgtctcccctgatgggcggctttggactgaagcacccgcctcctcaaattctcatcaagaacacaccggttccagcggacccgccgcttaccttcaaccaggccaagctgaactctttcatcacgcagtacagcaccggacaggtcagcgtggaaatcgagtgggagctgcagaaagaaaacagcaaacgctggaatccagagattcaatacacttccaactactacaaatctacaaatgtggactttgctgtcaacacggaaggagtttatagcgagcctcgccccattggcacccgttacctcacccgcaacctgtaattacatgttaatcaataaaccggttaattcgtttcagttgaactttggtctctgcgaagggcgaattc

SEQ ID NO: 106 - protein, 736 aa, Adeno-associated virus
MAADGYLPDWLEDNLSEGIREWWDLKPGAPKPKANQQKQDDGRGLVLPGYKYLGPFNGLDKGEPVNAADAAALEHDKAYDQQLKAGDNPYLRYNHADAEFQERLQEDTSFGGNLGRAVFQAKKRVLEPLGLVEEGAKTAPGKKRPVEQSPQEPDSSSGIGKTGQQPAKKRLNFGQTGDSESVPDPQPLGEPPAAPSGLGPNTMASGGGAPMADNNEGADGVGNSSGNWHCDSTWLGDRVITTSTRTWALPTYNNHLYKQISNGTSGGSTNDNTYFGYSTPWGYFDFNRFHCHFSPRDWQRLINNNWGFRPKRLNFKLFNIQVKEVTTNEGTKTIANNLTSTVQVFTDLEYQLPYVLGSAHQGCLPPFPADVFMVPQYGYLTLNNGSQALGRSSFYCLEYFPSQMPRTGNNFQFSYTFEDVPFHSSYAHSQSLDRLMNPLIDQYLYYLVRTQTTGTGGTQTLAFSQAGPSSMANQARNWVPGPCYRQQRVSTTTNQNNNSNFAWTGAAKFKLNGRDSLMNPGVAMASHKDDDDRFFPSSGVLIFGKQGAGNDGVDYSQVLITDEEEIKATNPVATEEYGAVAINNQAANTQAQTGLVHNQGVIPGMVWQNRDVYLQGPIWAKIPHTDGNFHPSPLMGGFGLKHPPPQILIKNTPVPADPPLTFNQAKLNSFITQYSTGQVSVEIEWELQKENSKRWNPEIQYTSNYYKSTNVDFAVNTEGVYSEPRPIGTRYLTRNL

SEQ ID NO: 107 - DNA, 3122 bp, Adeno-associated virus
  source 1..3122: mol_type = unassigned DNA
gaattcgccctttctacggctgcgtcaactggaccaatgagaactttcccttcaacgattgcgtcgacaagatggtgatctggtgggaggagggcaagatgacggccaaggtcgtggagtccgccaaggccattctcggcggcagcaaggtgcgtgtggaccaaaagtgcaagtcttccgcccagatcgatcccacccccgtgatcgtcacctccaacaccaacatgtgcgccgtgattgacgggaacagcaccaccttcgagcaccagcagccgttgcaggaccggatgttcaaatttgaactcacccgccgtctggagcatgactttggcaaggtgacgaagcaggaagtcaaagggttcttccgctgggcgcaggatcacgtgaccgaggtggcgcatgagttccacgtgcgagcccaagcgggcctgcccctcagtcgcggatccatcgacgtcagaccagaaagggtggagccaacaagagacccgcccccgatgacgcggatataagcggaaggagctccggtggactttgccgacaggtaccaaaacaaatgttctcgtcacgcgggcatgcttcagatgctgtttccctgcaagacatgcgagagaatgaatcagaatttcaacatttgcttcacgcacgggaccagagactgttcagaatgtttccccggcgtgtcagaatctcaaccggtcgtcagaaagaggacgtatcggaaactctgtgcgattcatcatctgctggggcgggctcccgagattgcttgctcggcctgcgatctggtcaacgtggacctggatgactgtgtttctgagcaataaatgacttaaaccaggtatggctgccgatggttatcttccagattggctcgaggacaacctctctgagggcattcgcgagtggtgggacttgaaacctggagccccgaaacccaaagccaaccagcaaaagcaggacgacggccggggtctggtgcttcctggctacaagtacctcggacccttcaacggactcgacaagggggagcccgtcaacgcggcggacgcagcggccctcgagcacgacaaagcctacgaccagcagctcaaagcgggtgacaatccgtacctgcggtataatcacgccgacgccgagtttcaggagcgtctgcaagaagatacgtcttttgggggcaacctcgggcgagcagtcttccaggccaagaagcgggttctcgaacctctcggtctggttgaggaaggcgctaagacggctcctggaaagaagagaccggtagagcagtcgccacaagagccagactcctcctcgggcatcggcaagacaggccagcagcccgctaaaaagagactcaattttggtcagactggcgactcagagtcagtccccgacccacaacctctcggagaacctccagcagccccctcaggtctgggacctaatacaatggcttcaggcggtggcgctccaatggcagacaataacgaaggcgccgacggagtgggtaattcctcgggaaattggcattgcgattccacatggctgggggacagagtcatcaccaccagcacccgaacctgggccctgcccacctacaacaaccacctctacaagcaaatctccaacggcacctcgggaggaagcaccaacgacaacacctattttggctacagcaccccctgggggtattttgacttcaacagattccactgtcacttttcaccacgtgactggcaacgactcatcaacaacaattggggattccggcccaaaagactcaacttcaagctgttcaacatccaggtcaaggaagtcacgacgaacgaaggcaccaagaccatcgccaataatctcaccagcaccgtgcaggtctttacggactcggagtaccagttaccgtacgtgctaggatccgctcaccagggatgtctgcctccgttcccggcggacgtcttcatggttcctcagtacggctatttaactttaaacaatggaagccaagccctgggacgttcctccttctactgtctggagtatttcccatcgcagatgctgagaaccggcaacaactttcagttcagctacaccttcgaggacgtgcctttccacagcagctacgcgcacagccagagcctggacaggctgatgaatcccctcatcgaccagtacctgtactacctggtcagaacgcaaacgactggaactggagggacgcagactctggcattcagccaagcgggtcctagctcaatggccaaccaggctagaaattgggtgcccggaccttgctaccggcagcagcgcgtctccacgacaaccaaccagaacaacaacagcaactttgcctggacgggagctgccaagtttaagctgaacggccgagactctctaatgaatccgggcgtggcaatggcttcccacaaggatgacgacgaccgcttcttcccttcgagcggggtcctgatttttggcaagcaaggagccgggaacgatggagtggattacagccaagtgctgattacagatgaggaagaaatcaaggctaccaaccccgtggccacagaagaatatggagcagtggccatcaacaaccaggccgccaatacgcaggcgcagaccggactcgtgcacaaccagggggtgattcccggcatggtgtggcagaatagagacgtgtacctgcagggtcccatctgggccaaaattcctcacacggacggcaactttcacccgtctcccctgatgggcggctttggactgaagcacccgcctcctcaaattctcatcaagaacacaccggttccagcggacccgccgcttaccttcaaccaggccaagctgaactctttcatcacgcagtacagcaccggacaggtcagcgtggaaatcgagtgggagctgcagaaagaaaacagcaaacgctggaatccagagattcaatacacttccaactactacaaatctacaaatgtggactttgctgtcaacacggagggggtttatagcgagcctcgccccattggcacccgttacctcacccgcaacctgtaattacatgttaatcaataaaccggttaattcgtttcagttgaactttggtctctgcgaagggcgaattc

SEQ ID NO: 108 - protein, 736 aa, Adeno-associated virus
MAADGYLPDWLEDNLSEGIREWWDLKPGAPKPKANQQKQDDGRGLVLPGYKYLGPFNGLDKGEPVNAADAAALEHDKAYDQQLKAGDNPYLRYNHADAEFQERLQEDTSFGGNLGRAVFQAKKRVLEPLGLVEEGAKTAPGKKRPVEQSPQEPDSSSGIGKTGQQPAKKRLNFGQTGDSESVPDPQPLGEPPAAPSGLGPNTMASGGGAPMADNNEGADGVGNSSGNWHCDSTWLGDRVITTSTRTWALPTYNNHLYKQISNGTSGGSTNDNTYFGYSTPWGYFDFNRFHCHFSPRDWQRLINNNWGFRPKRLNFKLFNIQVKEVTTNEGTKTIANNLTSTVQVFTDSEYQLPYVLGSAHQGCLPPFPADVFMVPQYGYLTLNNGSQALGRSSFYCLEYFPSQMLRTGNNFQFSYTFEDVPFHSSYAHSQSLDRLMNPLIDQYLYYLVRTQTTGTGGTQTLAFSQAGPSSMANQARNWVPGPCYRQQRVSTTTNQNNNSNFAWTGAAKFKLNGRDSLMNPGVAMASHKDDDDRFFPSSGVLIFGKQGAGNDGVDYSQVLITDEEEIKATNPVATEEYGAVAINNQAANTQAQTGLVHNQGVIPGMVWQNRDVYLQGPIWAKIPHTDGNFHPSPLMGGFGLKHPPPQILIKNTPVPADPPLTFNQAKLNSFITQYSTGQVSVEIEWELQKENSKRWNPEIQYTSNYYKSTNVDFAVNTEGVYSEPRPIGTRYLTRNL

SEQ ID NO: 109 - DNA, 2370 bp, Adeno-associated virus
  source 1..2370: mol_type = unassigned DNA
gaattcgccctttctacggctgcgtcaactggaccaatgagaactttcccttcaacgattgcgtcgacaagatggtgatctggtgggaggagggcaagatgacggccaaggtcgtggagtccgccaaggccattctcggcggcagcaaggtgcgcgtggaccaaaagtgcaagtcgtccgcccagatcgaccccacccccgtgatcgtcacctccaacaccaacatgtgcgccgtgattgacgggaacagcaccaccttcgagcaccagcagccgttgcaggaccggatgttcaagttcgaactcacccgccgtctggagcacgactttggcaaggtgaccaagcaggaagtcaaagagttcttccgctgggcgcaggatcacgtgaccgaggtggcgcatgagttctacgtcagaaagggcggagccagcaaaagacccgcccccgatgacgcggatataagcgagcccaagcgggcctgcccctcagtcgcggatccatcgacgtcagacgcggaaggagctccggtggactttgccgacaggtaccaaaacaaatgttctcgtcacgcgggcatgcttcagacgctgtttccctgcaaaacgtgcgagagaatgaatcagaatttcaacatttgcttcacgcacggggtcagagactgctcagaatgtttccccggtgcatcagaatctcaaccggtcgtcagaaaaaaaacgtatcagaaactgtgtgccattcatcatctgctggggcgggcacccgagattgcttgctcggcctgcgatctggtcaacgtggacctggacgactgtgtttctgagcaataaatgacttaaaccaggtatggctgccgatggttatcttccagattggcttgaggacaacctctctgagggcattcgcgagtggtgggacctgaaacctggagccccgaaacccaaagccaaccagcaaaagcaggacgacggccggggtctggtgcttcctggctacaagtacctcggacccttcaacggactcgacaagggggagcccgtcaacgcggcggacgcagcggccctcgagcacgacaaggcctacgaccagcagctcaaagcgggtgacaatccgtacctgcggtataaccacgccgacgccgagtttcaggagcgtctgcaagaagatacgtcttttgggggcaacctcgggcgagcagtcttccaggccaagaagcgggttctcgaacctctcggtctggttgaggaaggcgctaagacggctcctggaaagaagagaccggtagagccatcacctcagcgttcccccgactcctccacgggcatcggcaagaaaggccaccagcccgcgagaaagagactgaactttgggcagactggcgactcggagtcagtccccgaccctcaaccaatcggagaaccaccagcaggcccctctggtctgggatctggtacaatggctgcaggcggtggcgctccaatggcagacaataacgaaggcgccgacggagtgggtagttcctcaggaaattggcattgcgattccacatggctgggcgacagagtcatcaccaccagcacccgaacctgggccctgcccacctacaacaaccatctctacaagcaaatctccaacgggacatcgggaggaagcactaacgacaacacctactttggctacagcaccccctgggggtattttgacttcaacagattccactgccacttctcaccacgtgactggcagcgactcatcaacaataactggggattccggcccaagagactcaacttcaagctcttcaacatccaggtcaaggaggtcacgcagaatgaaggcaccaagaccatcgccaataaccttaccagcacgattcaggtgtttacggactcggaataccagctcccgtacgtcctcggctctgcgcaccagggctgcctccctccgttcccggcggacgtcttcatgattcctcagtacgggtatctgaccctaaacaatggcagtcaggctgtgggccgttcctccttctactgcctggaatacttcccttctcaaatgctgaggacgggcaacaactttgaattcagctacaccttcgaggacgtgcctttccacagcagctacgcgcacagccagagcctggaccggctgatgaaccctctcatcgaccagtacctgtattacttatccagaactcagtccacaggaggaactcaaggtactcagcaattgttattttctcaagccgggcccgcaaacatgtyggctcaggccaagaactggctacctggaccgtgttaccgtcagcaacgagtttccacgacactgtcgcaaaacaacaacagcaattttgctggaccggtgccacca

SEQ ID NO: 110 - protein, 738 aa, Adeno-associated virus; identical to SEQ ID NO: 100

SEQ ID NO: 111 - DNA, 2205 bp, Adeno-associated virus
  source 1..2205: mol_type = unassigned DNA
atgactgacggttaccttccagattggctagaggacaacctctctgaaggcgttcgagagtggtgggcgctgcaacctggagcccctaaacccaaggcaaatcaacaacatcaggacaacgctcggggtcttgtgcttccgggttacaaatacctcggacccggcaacggactcgacaagggggaacccgtcaacgcagcggacgcggcagccctcgagcacgacaaggcctacgaccagcagctcaaggccggtgacaacccctacctcaagtacaaccacgccgacgcggagttccagcagcggcttcagggcgacacatcgtttgggggcaacctcggcagagcagtcttccaggccaaaaagagggttcttgaacctcttggtctggttgagcaagcgggtgagacggctcctggaaagaagagaccgttgattgaatccccccagcagcccgactcctccacgggtatcggcaaaaaaggcaagcagccggctaaaaagaagctcgttttcgaagacgaaactggagcaggcgacggaccccctgagggatcaacttccggagccatgtctgatgacagtgagatgcgtgcagcagctggcggagctgcagtcgagggcggacaaggtgccgatggagtgggtaatgcctcgggtgattggcattgcgattccacctggtctgagggccacgtcacgaccaccagcaccagaacctgggtcttgcccacctacaacaaccacctctacaagcgactcggagagagcctgcagtccaacacctacaacggattctccaccccctggggatactttgacttcaaccgcttccactgccacttctcaccacgtgactggcagcgactcatcaacaacaactggggcatgcgacccaaagccatgcgggtcaaaatcttcaacatccaggtcaaggaggtcacgacgtcgaacggcgagacaacggtggctaataaccttaccagcacggttcagatctttgcggactcgtcgtacgaactgccgtacgtgatggatgcgggtcaagagggcagcctgcctccttttcccaacgacgtctttatggtgccccagtacggctactgtggactggtgaccggcaacacttcgcagcaacagactgacagaaatgccttctactgcctggagtactttccttcgcagatgctgcggactggcaacaactttgaaattacgtacagttttgagaaggtgcctttccactcgatgtacgcgcacagccagagcctggaccggctgatgaaccctctcatcgaccagtacctgtggggactgcaatcgaccaccaccggaaccaccctgaatgccgggactgccaccaccaactttaccaagctgcggcctaccaacttttccaactttaaaaagaactggctgcccgggccttcaatcaagcagcagggcttctcaaagactgccaatcaaaactacaagatccctgccaccgggtcagacagtctcatcaaatacgagacgcacagcactctggacggaagatggagtgccctgacccccggacctccaatggccacggctggacctgcggacagcaagttcagcaacagccagctcatctttgcggggcctaaacagaacggcaacacggccaccgtacccgggactctgatcttcacctctgaggaggagctggcagccaccaacgccaccgatacggacatgtggggcaacctacctggcggtgaccagagcaacagcaacctgccgaccgtggacagactgacagccttgggagccgtgcctggaatggtctggcaaaacagagacatttactaccagggtcccatttgggccaagattcctcataccgatggacactttcacccctcaccgctgattggtgggtttgggctgaaacacccgcctcctcaaatttttatcaagaacaccccggtacctgcgaatcctgcaacgaccttcagctctactccggtaaactccttcattactcagtacagcactggccaggtgtcggtgcagattgactgggagatccagaaggagcggtccaaacgctggaaccccgaggtccagtttacctccaactacggacagcaaaactctctgttgtgggctcccgatgcggctgggaaatacactgagcctagggctatcggtacccgctacctcacccaccacctgtaa

SEQ ID NO: 112 - protein, 734 aa, Adeno-associated virus; identical to SEQ ID NO: 84

SEQ ID NO: 113 - DNA, 3128 bp, Adeno-associated virus
  source 1..3128: mol_type = unassigned DNA
gaattcgccctttctacggctgcgtcaactggaccaatgagaactttcccttcaacgattgcgtcgacaagatgttgatctggtgggaggagggcaagatgacggccaaggtcgtggagtccgccaaggccattctcggcggcagcaaagtgcgcgtggaccaaaagtgcaagccgtccgcccagatcgaccccacccccgtgatcgtcacctccaacaccaacatgtgcgccgtgattgacgggaacagcaccaccttcgagcaccagcagccgttgcgggaccggatgttcaagtttgaactcacccgccgtctggagcacgactttggcaaggtgacaaagcaggaagtcagagagttcttccgctgggcgcaggatcacgtgaccgaggtggcgcacgagttctacgtcagaaagggtggagccaacaagagacccgcccccgatgacgcggataaaagcgagcccaagcgggcctgcccctcagtcgcggatccatcgacgtcagacgcggaaggagctccggtggactttgccgacaggtaccaaaacaaatgttctcgtcacgcgggcatgcttcagatgctgtttccctgcaaaacatgcgagagaatgaatcagaatttcaacatttgcttcacgcacgggaccagagactgttcagaatgtttccccggcgtgtcagaatctcaaccggtcgtcagaaaaaagacgtatcggaaactctgtgcgattcatcatctgctggggcgggcacccgagattgcttgctcggcctgcgatctggtcaacgtggacctagatgactgtgtttctgagcaataaatgacttaaaccaggtatggctgccgatggttatcttccagattggctcgaggacaacctctctgagggcattcgcgagtggtgggacttgaaacctggagccccgaaacccaaagccaaccagcaaaagcaggacgacggccggggtctggtgcttcctggctacaagtacctcggacccttcaacggactcgacaagggggagcccgtcaacgcggcggacgcagcggccctcgagcacgacaaggcctacgaccagcagctcaaagcgggtgacaatccgtacctgcggtataaccacgccgacgccgagtttcaggagcgtctgcaagaagatacgtcttttgggggcaacctcgggcgagcagtcttccaggccaagaagcgggttctcgaacctctcggtctggttgaggaaggcgctaagacggctcctggaaagaagagaccggtagagccatcaccccagcgttctccagactcctctacgggcatcggcaagaaaggccagcagcccgcgaaaaagagactcaactttgggcagactggcgactcagagtcagtgcccgaccctcaaccaatcggagaaccccccgcaggcccctctggtctgggatctggtacaatggctgcaggcggtggcgctccaatggcagacaataacgaaggcgccgacggagtgggtagttcctcaggaaattggcattgcgattccacatggctgggcgacagagtcatcaccaccagcacccgaacctgggccctccccacctacaacaaccacctctacaagcaaatctccaacgggacttcgggaggaagcaccaacgacaacacctacttcggctacagcaccccctgggggtattttgactttaacagattccactgccacttctcaccacgtgactggcagcgactcatcaacaacaactggggattccggcccaagagactcaacttcaagctcttcaacatccaggtcaaggaggtcacgcagaatgaaggcaccaagaccatcgccaataaccttaccagcacgattcaggtctttacggactcggaataccagctcccgtacgtcctcggctctgcgcaccagggctgcctgcctccgttcccggcggacgtcttcatgattcctcagtacgggtacctgactctgaacaatggcagtcaggccgtgggccgttcctccttctactgcctggagtactttccttctcaaatgctgagaacgggcaacaactttgagttcagctaccagtttgaggacgtgccttttcacagcagctacgcgcacagccaaagcctggaccggctgatgaaccccctcatcgaccagtacctgtactacctgtctcggactcagtccacgggaggtaccgcaggaactcagcagttgctattttctcaggccgggcctaataacatgtcggctcaggccaaaaactggctacccgggccctgctaccggcagcaacgcgtctccacgacactgtcgcaaaataacaacagcaactgtaaatcccggtgtcgctatggcaacccacaaggacgacgaagagcgattttgcctggaccggtgccaccaagtatcatctgaatggcagagactctctgttttccgtccagcggagtcttaatgtttgggaaacagggagctggaaaagacaacgtggactatagcagcgttatgctaaccagtgaggaagaaattaaaaccaccaacccagtggccacggaacagtacggcgtggtggccgataacctgcaacagcaaaacgccgctcctattgtaggggccgtcaacagtcaaggagccttacctggcatggtctggcagaaccgggacgtgtacctgcagggtcctatctgggccaagattcctcacacggacggaaactttcatccctcgccgctgatgggaggctttggactgaaacacccgcctcctcagatcctgattaagaatacacctgttcccgcggatcctccaactaccttcagtcaagctaagctggcgtcgttcatcacgcagtacagcaccggacaggtcagcgtggaaattgaatgggagctgcagaaagaaaacagcaaacgctggaacccagagattcaatacacttccaactactacaaatctacaaatgtggacttcgctgttaacacagatggcacttattctgagcctcgccccattggcacccgttacctcacccgtaatctgtaattgctcgttaatcaataaaccggttgattcgtttcagttgaactttggtctctgcgaagggcgaattc

SEQ ID NO: 114 - protein, 738 aa, Adeno-associated virus; identical to SEQ ID NO: 34

SEQ ID NO: 115 - DNA, 3128 bp, Adeno-associated virus
  source 1..3128: mol_type = unassigned DNA
gaattcgccctttctacggctgcgtcaactggaccaatgagaactttcccttcaacgattgcgtcgacaagatggtgatctggtgggaggagggcaagatgacggccaaggtcgtggagtccgccaaggccattctcggcggcagcaaagtgcgcgtggaccaaaagtgcaagtcgtccgcccagatcgaccccacccccgtgatcgtcacctccaacaccaacatgtgcgccgtgattgacgggaacagcaccaccttcgagcaccagcagccgttgcaggaccggatgttcaagtttgaactcacccgccgtctggagcacgactttggcaaggtgacaaagcaggaagtcagagagttcttccgctgggcgcaggatcacgtgaccgaggtggcgcacgagttctacgtcagaaagggtggagccaacaagagacccgcccccgatgacgcggataaaagcgagcccaagcgggcctgcccctcagtcgcggatccatcgacgtcagacgcggaaggagctccggtggactttgccgacaggtaccaaaacaaatgttctcgtcacgcgggcatgcttcagatgctgtttccctgcaaaacatgcgagagaatgaatcagaatttcaacatttgcttcacgcacgggaccagagactgttcagaatgtttccccggcgtgtcagaatctcaaccggttgtcagaaaaaagacgtatcggaaactctgtgcgattcatcatctgctggggcgggcacccgagattgcttgctcggcctgcgatctggtcaacgtggacctagatgactgtgtttctgagcaataaatgacttaaaccaggtatggctgccgatggttatcttccagattggctcgaggacaacctctctgagggcattcgcgagtggtgggacttgaaacctggagccccgaaacccaaagccaaccagcaaaagcaggacgacggccggggtctggtgcttcctggctacaagtacctcggacccttcaacggactcgacaagggggagcccgtcaacgcggcggacgcagcggccctcgagcacgacaaggcctacgaccagcagctcaaagcgggtgacaatccgtacctgcggtataaccacgccgacgccgagtttcaggagcgtctgcaagaagatacgtcttttgggggcaacctcgggcgagcagtcttccaggccaagaagcgggttctcgaacctctcggtctggttgaggaaggcgctaagacggctcctggaaagaagagaccggtagagccatcaccccagcgttctccagactcctctacgggcatcggcaagaaaggccagcagcccgcgaaaaagagactcaactttgggcagactggcgactcagagtcagtgcccgaccctcaaccaatcggagaaccccccgcaggcccctctggtctgggatctggtacaatggctgcaggcggtggcgctccaatggcagacaataacgaaggcgccgacggagtgggtagttcctcaggaaattggcattgcgattccacatggctgggcgacagagtcatcaccaccagcacccgaacctgggccctccccacctacaacaaccacctctacaagcaaatctccaacgggacttcgggaggaagcaccaacgacaacacctacttcggctacagcaccccctgggggtattttgactttaacagattccactgccacttctcaccacgtgactggcagcgactcatcaacaacaactggggattccggcccaagagacccaacttcaagctcttcaacatccaggtcaaggaggtcacgcagaatgaaggcaccaagaccatcgccaataaccttaccagcacgattcaggtctttacggactcggaataccagctcccgtacgtcctcggctctgcgcaccagggctgcctgcctccgttcccggcggacgtcttcatgattcctcagtacgggtacctgactctgaacaatggcagtcaggccgtgggccgttcctccttctactgcctggagtactttccttctcaaatgctgagaacgggcaacaactttgagttcagctaccagtttgaggacgtgccttttcacagcagctacgcgcacagccaaagcctggaccggctgatgaaccccctcatcgaccagtacctgtactacctgtctcggactcagtccacgggaggtaccgcaggaactcagcagttgctattttctcaggccgggcctaataacatgtcggctcaggccaaaaactggctacccgggccctgctaccggcagcaacgcgtctccacgacactgtcgcaaaataacaacagcaactttgcctggaccggtgccaccaagtatcatctgaatggcagagactctctggtaaatcccggtgtcgctatggcaacccacaaggacgacgaagagcgattttttccgtccagcggagtcttaatgtttgggaaacagggagctggaaaagacaacgtggactatagcagcgttatgctaaccagtgaggaagaaattaaaaccaccaacccagtggccacagaacagtacggcgtggtggccgataacctgcaacagcaaaacgccgctcctattgtaggggccgtcaacagtcaaggagccttacctggcatggtctggcagaaccgggacgtgtacctgcagggtcctatctgggccaagattcctcacacggacggaaactttcatccctcgccgctgatgggaggctttggactgaaacacccgcctcctcagatcctgattaagaatacacctgttcccgcggatcctccaactaccttcagtcaagctaagctggcgtcgttcatcacgcagtacagcaccggacaggtcagcgtggaaattgaatgggagctgcagaaagaaaacagcaaacgctggaacccagagattcaatacacttccaactactacaaatctacaaatgtggactttgctgttaacacagatggcacttattctgagcctcgccccattggcacccgttacctcacccgtaatctgtaattgcttgttaatcaataaaccggttgattcgtttcagttgaactttggtctctgcgaagggcgaattc

SEQ ID NO: 116 - protein, 738 aa, Adeno-associated virus
MAADGYLPDWLEDNLSEGIREWWDLKPGAPKPKANQQKQDDGRGLVLPGYKYLGPFNGLDKGEPVNAADAAALEHDKAYDQQLKAGDNPYLRYNHADAEFQERLQEDTSFGGNLGRAVFQAKKRVLEPLGLVEEGAKTAPGKKRPVEPSPQRSPDSSTGIGKKGQQPAKKRLNFGQTGDSESVPDPQPIGEPPAGPSGLGSGTMAAGGGAPMADNNEGADGVGSSSGNWHCDSTWLGDRVITTSTRTWALPTYNNHLYKQISNGTSGGSTNDNTYFGYSTPWGYFDFNRFHCHFSPRDWQRLINNNWGFRPKRPNFKLFNIQVKEVTQNEGTKTIANNLTSTIQVFTDSEYQLPYVLGSAHQGCLPPFPADVFMIPQYGYLTLNNGSQAVGRSSFYCLEYFPSQMLRTGNNFEFSYQFEDVPFHSSYAHSQSLDRLMNPLIDQYLYYLSRTQSTGGTAGTQQLLFSQAGPNNMSAQAKNWLPGPCYRQQRVSTTLSQNNNSNFAWTGATKYHLNGRDSLVNPGVAMATHKDDEERFFPSSGVLMFGKQGAGKDNVDYSSVMLTSEEEIKTTNPVATEQYGVVADNLQQQNAAPIVGAVNSQGALPGMVWQNRDVYLQGPIWAKIPHTDGNFHPSPLMGGFGLKHPPPQILIKNTPVPADPPTTFSQAKLASFITQYSTGQVSVEIEWELQKENSKRWNPEIQYTSNYYKSTNVDFAVNTDGTYSEPRPIGTRYLTRNL

SEQ ID NO: 117 - protein, 738 aa, Adeno-associated virus
MAADGYLPDWLEDNLSEGIREWWDLKPGAPKPKANQQKQDDGRGLVLPGYKYLGPFNGLDKGEPVNAADAAALEHDKAYDQQLKAGDNPYLRYNHADAEFQERLQEDTSFGGNLGRAVFQAKKRVLEPLGLVEEAAKTAPGKKRPVEPSPQRSPDSSTGIGKKGQQPAKKRLNFGQTGDSESVPDPQPIGEPPAGPSGLGSGTMAAGGGAPMADNNEGADGVGSSSGNWHCDSTWLGDRVITTSTRTWALPTYNNHLYKQISNGTSGGSTNDNTYFGYSTPWGYFDFNRFHCHFSPRDWQRLINNNWGFRPKRLSFKLFNIQVKEVTQNEGTKTIANNLTSTIQVFTDSEYQLPYVLGSAHQGCLPPFPADVFMIPQYGYLTLNNGSQAVGRSSFYCLEYFPSQMLRTGNNFEFSYTFEDVPFHSSYAHSQSLDRLMNPLIDQYLYYLSRTQSTGGTQGTQQLLFSQAGPANMSAQAKNWLPGPCYRQQRVSTTLSQNNNSNFAWTGATKYHLNGRDSLVNPGVAMATHKDDEERFFPSSGVLMFGKQGAGRDNVDYSSVMLTSEEEIKTTNPVATEQYGVVADNLQQTNTGPIVGNVNSQGALPGMVWQNRDVYLQGPIWAKIPHTDGNFHPSPLMGGFGLKHPPPQILIKNTPVPADPPTTFSQAKLASFITQYSTGQVSVEIEWELQKENSKRWNPEIQYTSNYYKSTNVDFAVNTEGTYSEPRPIGTRYLTRNL

SEQ ID NO: 118 - DNA, 2172 bp, synthetic construct
  misc_feature 1..2172: note = Description of Artificial Sequence: Synthetic polynucleotide
  source 1..2172: mol_type = other DNA
atgtcttttgttgatcaccctccagattggttggaagaagttggtgaaggtcttcgcgagtttttgggccttgaagcgggcccaccgaaaccaaaacccaatcagcagcatcaagatcaagcccgtggtcttgtgctgcctggttataactatctcggacccggaaacggtctcgatcgaggagagcctgtcaacagggcagacgaggtcgcgcgagagcacgacatctcgtacaacgagcagcttgaggcgggagacaacccctacctcaagtacaaccacgcggacgccgagtttcaggagaagctcgccgacgacacatccttcgggggaaacctcggaaaggcagtctttcaggccaagaaaagggttctcgaaccttttggcctggttgaagagggtgctaagacggcccctaccggaaagcggatagacgaccactttccaaaaagaaagaaggctcggaccgaagaggactccaagccttccacctcgtcagacgccgaagctggacccagcggatcccagcagctgcaaatcccagcccaaccagcctcaagtttgggagctgatacaatgtctgcgggaggtggcggcccattgggcgacaataaccaaggtgccgatggagtgggcaatgcctcgggagattggcattgcgattccacgtggatgggggacagagtcgtcaccaagtccacccgaacctgggtgctgcccagctacaacaaccaccagtaccgagagatcaaaagcggctccgtcgacggaagcaacgccaacgcctactttggatacagcaccccctgggggtactttgactttaaccgcttccacagccactggagcccccgagactggcaaagactcatcaacaactactggggcttcagaccccggtccctcagagtcaaaatcttcaacattcaagtcaaagaggtcacggtgcaggactccaccaccaccatcgccaacaacctcacctccaccgtccaagtgtttacggacgacgactaccagctgccctacgtcgtcggcaacgggaccgagggatgcctgccggccttccctccgcaggtctttacgctgccgcagtacggttacgcgacgctgaaccgcgacaacacagaaaatcccaccgagaggagcagcttcttctgcctagagtactttcccagcaagatgctgagaacgggcaacaactttgagtttacctacaactttgaggaggtgcccttccactccagcttcgctcccagtcagaacctgttcaagctggccaacccgctggtggaccagtacttgtaccgcttcgtgagcacaaataacactggcggagtccagttcaacaagaacctggccgggagatacgccaacacctacaaaaactggttcccggggcccatgggccgaacccagggctggaacctgggctccggggtcaaccgcgccagtgtcagcgccttcgccacgaccaataggatggagctcgagggcgcgagttaccaggtgcccccgcagccgaacggcatgaccaacaacctccagggcagcaacacctatgccctggagaacactatgatcttcaacagccagccggcgaacccgggcaccaccgccacgtacctcgagggcaacatgctcatcaccagcgagagcgagacgcagccggtgaaccgcgtggcgtacaacgtcggcgggcagatggccaccaacaaccagagctccaccactgcccccgcgaccggcacgtacaacctccaggaaatcgtgcccggcagcgtgtggatggagagggacgtgtacctccaaggacccatctgggccaagatcccagagacgggggcgcactttcacccctctccggccatgggcggattcggactcaaacacccaccgcccatgatgctcatcaagaacacgcctgtgcccggaaatatcaccagcttctcggacgtgcccgtcagcagcttcatcacccagtacagcaccgggcaggtcaccgtggagatggagtgggagctcaagaaggaaaactccaagaggtggaacccagagatccagtacacaaacaactacaacgacccccagtttgtggactttgccccggacagcaccggggaatacagaaccaccagacctatcggaacccgataccttacccgacccctt

SEQ ID NO: 119 - protein, 720 aa, Adeno-associated virus
MSFVDHPPDWLEEVGEGLREFLGLEAGPPKPKPNQQHQDQARGLVLPGYNYLGPGNGLDRGEPVNRADEVAREHDISYNEQLEAGDNPYLKYNHADAEFQEKLADDTSFGGNLGKAVFQAKKRVLEPFGLVEEGAKTAPTGKRIDDHFPKRKKARTEEDSKPSTSSDAEAGPSGSQQLQIPAQPASSLGADTMSAGGGGPLGDNNQGADGVGNASGDWHCDSTWMGDRVVTKSTRTWVLPSYNNHQYREIKSGSVDGSNANAYFGYSTPWGYFDFNRFHSHWSPRDWQRLINNYWGFRPRSLRVKIFNIQVKEVTVQDSTTTIANNLTSTVQVFTDDDYQLPYVVGNGTEGCLPAFPPQVFTLPQYGYATLNRDNTENPTERSSFFCLEYFPSKMLRTGNNFEFTYNFEEVPFHSSFAPSQNLFKLANPLVDQYLYRFVSTNNTGGVQFNKNLAGRYANTYKNWFPGPMGRTQGWNLGSGVNRASVSAFATTNRMELEGASYQVPPQPNGMTNNLQGSNTYALENTMIFNSQPANPGTTATYLEGNMLITSESETQPVNRVAYNVGGQMATNNQSSTTAPATGTYNLQEIVPGSVWMERDVYLQGPIWAKIPETGAHFHPSPAMGGFGLKHPPPMMLIKNTPVPGNITSFSDVPVSSFITQYSTGQVTVEMEWELKKENSKRWNPEIQYTNNYNDPQFVDFAPDSTGEYRTTRPIGTRYL

SEQ ID NO: 120 - protein, 724 aa, Adeno-associated virus 5
MSFVDHPPDWLEEVGEGLREFLGLEAGPPKPKPNQQHQDQARGLVLPGYNYLGPGNGLDRGEPVNRADEVAREHDISYNEQLEAGDNPYLKYNHADAEFQEKLADDTSFGGNLGKAVFQAKKRVLEPFGLVEEGAKTAPTGKRIDDHFPKRKKARTEEDSKPSTSSDAEAGPSGSQQLQIPAQPASSLGADTMSAGGGGPLGDNNQGADGVGNASGDWHCDSTWMGDRVVTKSTRTWVLPSYNNHQYREIKSGSVDGSNANAYFGYSTPWGYFDFNRFHSHWSPRDWQRLINNYWGFRPRSLRVKIFNIQVKEVTVQDSTTTIANNLTSTVQVFTDDDYQLPYVVGNGTEGCLPAFPPQVFTLPQYGYATLNRDNTENPTERSSFFCLEYFPSKMLRTGNNFEFTYNFEEVPFHSSFAPSQNLFKLANPLVDQYLYRFVSTNNTGGVQFNKNLAGRYANTYKNWFPGPMGRTQGWNLGSGVNRASVSAFATTNRMELEGASYQVPPQPNGMTNNLQGSNTYALENTMIFNSQPANPGTTATYLEGNMLITSESETQPVNRVAYNVGGQMATNNQSSTTAPATGTYNLQEIVPGSVWMERDVYLQGPIWAKIPETGAHFHPSPAMGGFGLKHPPPMMLIKNTPVPGNITSFSDVPVSSFITQYSTGQVTVEMEWELKKENSKRWNPEIQYTNNYNDPQFVDFAPDSTGEYRTTRPIGTRYLTRPL

SEQ ID NO: 121 - protein, 2175 aa, Adeno-associated virus 5
ATGTCTTTTGTTGATCACCCTCCAGATTGGTTGGAAGAAGTTGGTGAAGGTCTTCGCGAGTTTTTGGGCCTTGAAGCGGGCCCACCGAAACCAAAACCCAATCAGCAGCATCAAGATCAAGCCCGTGGTCTTGTGCTGCCTGGTTATAACTATCTCGGACCCGGAAACGGTCTCGATCGAGGAGAGCCTGTCAACAGGGCAGACGAGGTCGCGCGAGAGCACGACATCTCGTACAACGAGCAGCTTGAGGCGGGAGACAACCCCTACCTCAAGTACAACCACGCGGACGCCGAGTTTCAGGAGAAGCTCGCCGACGACACATCCTTCGGGGGAAACCTCGGAAAGGCAGTCTTTCAGGCCAAGAAAAGGGTTCTCGAACCTTTTGGCCTGGTTGAAGAGGGTGCTAAGACGGCCCCTACCGGAAAGCGGATAGACGACCACTTTCCAAAAAGAAAGAAGGCTCGGACCGAAGAGGACTCCAAGCCTTCCACCTCGTCAGACGCCGAAGCTGGACCCAGCGGATCCCAGCAGCTGCAAATCCCAGCCCAACCAGCCTCAAGTTTGGGAGCTGATACAATGTCTGCGGGAGGTGGCGGCCCATTGGGCGACAATAACCAAGGTGCCGATGGAGTGGGCAATGCCTCGGGAGATTGGCATTGCGATTCCACGTGGATGGGGGACAGAGTCGTCACCAAGTCCACCCGAACCTGGGTGCTGCCCAGCTACAACAACCACCAGTACCGAGAGATCAAAAGCGGCTCCGTCGACGGAAGCAACGCCAACGCCTACTTTGGATACAGCACCCCCTGGGGGTACTTTGACTTTAACCGCTTCCACAGCCACTGGAGCCCCCGAGACTGGCAAAGACTCATCAACAACTACTGGGGCTTCAGACCCCGGTCCCTCAGAGTCAAAATCTTCAACATTCAAGTCAAAGAGGTCACGGTGCAGGACTCCACCACCACCATCGCCAACAACCTCACCTCCACCGTCCAAGTGTTTACGGACGACGACTACCAGCTGCCCTACGTCGTCGGCAACGGGACCGAGGGATGCCTGCCGGCCTTCCCTCCGCAGGTCTTTACGCTGCCGCAGTACGGTTACGCGACGCTGAACCGCGACAACACAGAAAATCCCACCGAGAGGAGCAGCTTCTTCTGCCTAGAGTACTTTCCCAGCAAGATGCTGAGAACGGGCAACAACTTTGAGTTTACCTACAACTTTGAGGAGGTGCCCTTCCACTCCAGCTTCGCTCCCAGTCAGAACCTGTTCAAGCTGGCCAACCCGCTGGTGGACCAGTACTTGTACCGCTTCGTGAGCACAAATAACACTGGCGGAGTCCAGTTCAACAAGAACCTGGCCGGGAGATACGCCAACACCTACAAAAACTGGTTCCCGGGGCCCATGGGCCGAACCCAGGGCTGGAACCTGGGCTCCGGGGTCAACCGCGCCAGTGTCAGCGCCTTCGCCACGACCAATAGGATGGAGCTCGAGGGCGCGAGTTACCAGGTGCCCCCGCAGCCGAACGGCATGACCAACAACCTCCAGGGCAGCAACACCTATGCCCTGGAGAACACTATGATCTTCAACAGCCAGCCGGCGAACCCGGGCACCACCGCCACGTACCTCGAGGGCAACATGCTCATCACCAGCGAGAGCGAGACGCAGCCGGTGAACCGCGTGGCGTACAACGTCGGCGGGCAGATGGCCACCAACAACCAGAGCTCCACCACTGCCCCCGCGACCGGCACGTACAACCTCCAGGAAATCGTGCCCGGCAGCGTGTGGATGGAGAGGGACGTGTACCTCCAAGGACCCATCTGGGCCAAGATCCCAGAGACGGGGGCGCACTTTCACCCCTCTCCGGCCATGGGCGGATTCGGACTCAAACACCCACCGCCCATGATGCTCATCAAGAACACGCCTGTGCCCGGAAATATCACCAGCTTCTCGGACGTGCCCGTCAGCAGCTTCATCACCCAGTACAGCACCGGGCAGGTCACCGTGGAGATGGAGTGGGAGCTCAAGAAGGAAAACTCCAAGAGGTGGAACCCAGAGATCCAGTACACAAACAACTACAACGACCCCCAGTTTGTGGACTTTGCCCCGGACAGCACCGGGGAATACAGAACCACCAGACCTATCGGAACCCGATACCTTACCCGACCCCTTTAA

SEQ ID NO: 122 - DNA, 2208 bp, Adeno-associated virus 6
  source 1..2208: mol_type = unassigned DNA
atggctgccgatggttatcttccagattggctcgaggacaacctctctgagggcattcgcgagtggtgggacttgaaacctggagccccgaaacccaaagccaaccagcaaaagcaggacgacggccggggtctggtgcttcctggctacaagtacctcggacccttcaacggactcgacaagggggagcccgtcaacgcggcggatgcagcggccctcgagcacgacaaggcctacgaccagcagctcaaagcgggtgacaatccgtacctgcggtataaccacgccgacgccgagtttcaggagcgtctgcaagaagatacgtcttttgggggcaacctcgggcgagcagtcttccaggccaagaagagggttctcgaaccttttggtctggttgaggaaggtgctaagacggctcctggaaagaaacgtccggtagagcagtcgccacaagagccagactcctcctcgggcattggcaagacaggccagcagcccgctaaaaagagactcaattttggtcagactggcgactcagagtcagtccccgacccacaacctctcggagaacctccagcaacccccgctgctgtgggacctactacaatggcttcaggcggtggcgcaccaatggcagacaataacgaaggcgccgacggagtgggtaatgcctcaggaaattggcattgcgattccacatggctgggcgacagagtcatcaccaccagcacccgaacatgggccttgcccacctataacaaccacctctacaagcaaatctccagtgcttcaacgggggccagcaacgacaaccactacttcggctacagcaccccctgggggtattttgatttcaacagattccactgccatttctcaccacgtgactggcagcgactcatcaacaacaattggggattccggcccaagagactcaacttcaagctcttcaacatccaagtcaaggaggtcacgacgaatgatggcgtcacgaccatcgctaataaccttaccagcacggttcaagtcttctcggactcggagtaccagttgccgtacgtcctcggctctgcgcaccagggctgcctccctccgttcccggcggacgtgttcatgattccgcagtacggctacctaacgctcaacaatggcagccaggcagtgggacggtcatccttttactgcctggaatatttcccatcgcagatgctgagaacgggcaataactttaccttcagctacaccttcgaggacgtgcctttccacagcagctacgcgcacagccagagcctggaccggctgatgaatcctctcatcgaccagtacctgtattacctgaacagaactcagaatcagtccggaagtgcccaaaacaaggacttgctgtttagccgggggtctccagctggcatgtctgttcagcccaaaaactggctacctggaccctgttaccggcagcagcgcgtttctaaaacaaaaacagacaacaacaacagcaactttacctggactggtgcttcaaaatataaccttaatgggcgtgaatctataatcaaccctggcactgctatggcctcacacaaagacgacaaagacaagttctttcccatgagcggtgtcatgatttttggaaaggagagcgccggagcttcaaacactgcattggacaatgtcatgatcacagacgaagaggaaatcaaagccactaaccccgtggccaccgaaagatttgggactgtggcagtcaatctccagagcagcagcacagaccctgcgaccggagatgtgcatgttatgggagccttacctggaatggtgtggcaagacagagacgtatacctgcagggtcctatttgggccaaaattcctcacacggatggacactttcacccgtctcctctcatgggcggctttggacttaagcacccgcctcctcagatcctcatcaaaaacacgcctgttcctgcgaatcctccggcagagttttcggctacaaagtttgcttcattcatcacccagtattccacaggacaagtgagcgtggagattgaatgggagctgcagaaagaaaacagcaaacgctggaatcccgaagtgcagtatacatctaactatgcaaaatctgccaacgttgatttcactgtggacaacaatggactttatactgagcctcgccccattggcacccgttacctcacccgtcccctg

SEQ ID NO: 123 - protein, 736 aa, Adeno-associated virus 6
MAADGYLPDWLEDNLSEGIREWWDLKPGAPKPKANQQKQDDGRGLVLPGYKYLGPFNGLDKGEPVNAADAAALEHDKAYDQQLKAGDNPYLRYNHADAEFQERLQEDTSFGGNLGRAVFQAKKRVLEPFGLVEEGAKTAPGKKRPVEQSPQEPDSSSGIGKTGQQPAKKRLNFGQTGDSESVPDPQPLGEPPATPAAVGPTTMASGGGAPMADNNEGADGVGNASGNWHCDSTWLGDRVITTSTRTWALPTYNNHLYKQISSASTGASNDNHYFGYSTPWGYFDFNRFHCHFSPRDWQRLINNNWGFRPKRLNFKLFNIQVKEVTTNDGVTTIANNLTSTVQVFSDSEYQLPYVLGSAHQGCLPPFPADVFMIPQYGYLTLNNGSQAVGRSSFYCLEYFPSQMLRTGNNFTFSYTFEDVPFHSSYAHSQSLDRLMNPLIDQYLYYLNRTQNQSGSAQNKDLLFSRGSPAGMSVQPKNWLPGPCYRQQRVSKTKTDNNNSNFTWTGASKYNLNGRESIINPGTAMASHKDDKDKFFPMSGVMIFGKESAGASNTALDNVMITDEEEIKATNPVATERFGTVAVNLQSSSTDPATGDVHVMGALPGMVWQDRDVYLQGPIWAKIPHTDGHFHPSPLMGGFGLKHPPPQILIKNTPVPANPPAEFSATKFASFITQYSTGQVSVEIEWELQKENSKRWNPEVQYTSNYAKSANVDFTVDNNGLYTEPRPIGTRYLTRPL

SEQ ID NO: 124 - protein, 623 aa, Adeno-associated virus 6
MPGFYEIVIKVPSDLDEHLPGISDSFVNWVAEKEWELPPDSDMDLNLIEQAPLTVAEKLQRDFLVQWRRVSKAPEALFFVQFEKGESYFHLHILVETTGVKSMVLGRFLSQIRDKLVQTIYRGIEPTLPNWFAVTKTRNGAGGGNKVVDECYIPNYLLPKTQPELQWAWTNMEEYISACLNLAERKRLVAHDLTHVSQTQEQNKENLNPNSDAPVIRSKTSARYMELVGWLVDRGITSEKQWIQEDQASYISFNAASNSRSQIKAALDNAGKIMALTKSAPDYLVGPAPPADIKTNRIYRILELNGYDPAYAGSVFLGWAQKRFGKRNTIWLFGPATTGKTNIAEAIAHAVPFYGCVNWTNENFPFNDCVDKMVIWWEEGKMTAKVVESAKAILGGSKVRVDQKCKSSAQIDPTPVIVTSNTNMCAVIDGNSTTFEHQQPLQDRMFKFELTRRLEHDFGKVTKQEVKEFFRWAQDHVTEVAHEFYVRKGGANKRPAPDDADKSEPKRACPSVADPSTSDAEGAPVDFADRYQNKCSRHAGMLQMLFPCKTCERMNQNFNICFTHGTRDCSECFPGVSESQPVVRKRTYRKLCAIHHLLGRAPEIACSACDLVNVDLDDCVSEQ

SEQ ID NO: 125 - DNA, 4683 bp, Adeno-associated virus 6
  source 1..4683: mol_type = unassigned DNA
ttggccactccctctctgcgcgctcgctcgctcactgaggccgggcgaccaaaggtcgcccgacgcccgggctttgcccgggcggcctcagtgagcgagcgagcgcgcagagagggagtggccaactccatcactaggggttcctggaggggtggagtcgtgacgtgaattacgtcatagggttagggaggtcctgtattagaggtcacgtgagtgttttgcgacattttgcgacaccatgtggtcacgctgggtatttaagcccgagtgagcacgcagggtctccattttgaagcgggaggtttgaacgcgcagcgccatgccggggttttacgagattgtgattaaggtccccagcgaccttgacgagcatctgcccggcatttctgacagctttgtgaactgggtggccgagaaggaatgggagttgccgccagattctgacatggatctgaatctgattgagcaggcacccctgaccgtggccgagaagctgcagcgcgacttcctggtccagtggcgccgcgtgagtaaggccccggaggccctcttctttgttcagttcgagaagggcgagtcctacttccacctccatattctggtggagaccacgggggtcaaatccatggtgctgggccgcttcctgagtcagattagggacaagctggtgcagaccatctaccgcgggatcgagccgaccctgcccaactggttcgcggtgaccaagacgcgtaatggcgccggaggggggaacaaggtggtggacgagtgctacatccccaactacctcctgcccaagactcagcccgagctgcagtgggcgtggactaacatggaggagtatataagcgcgtgtttaaacctggccgagcgcaaacggctcgtggcgcacgacctgacccacgtcagccagacccaggagcagaacaaggagaatctgaaccccaattctgacgcgcctgtcatccggtcaaaaacctccgcacgctacatggagctggtcgggtggctggtggaccggggcatcacctccgagaagcagtggatccaggaggaccaggcctcgtacatctccttcaacgccgcctccaactcgcggtcccagatcaaggccgctctggacaatgccggcaagatcatggcgctgaccaaatccgcgcccgactacctggtaggccccgctccgcccgccgacattaaaaccaaccgcatttaccgcatcctggagctgaacggctacgaccctgcctacgccggctccgtctttctcggctgggcccagaaaaggttcggaaaacgcaacaccatctggctgtttgggccggccaccacgggcaagaccaacatcgcggaagccatcgcccacgccgtgcccttctacggctgcgtcaactggaccaatgagaactttcccttcaacgattgcgtcgacaagatggtgatctggtgggaggagggcaagatgacggccaaggtcgtggagtccgccaaggccattctcggcggcagcaaggtgcgcgtggaccaaaagtgcaagtcgtccgcccagatcgatcccacccccgtgatcgtcacctccaacaccaacatgtgcgccgtgattgacgggaacagcaccaccttcgagcaccagcagccgttgcaggaccggatgttcaaatttgaactcacccgccgtctggagcatgactttggcaaggtgacaaagcaggaagtcaaagagttcttccgctgggcgcaggatcacgtgaccgaggtggcgcatgagttctacgtcagaaagggtggagccaacaagagacccgcccccgatgacgcggataaaagcgagcccaagcgggcctgcccctcagtcgcggatccatcgacgtcagacgcggaaggagctccggtggactttgccgacaggtaccaaaacaaatgttctcgtcacgcgggcatgcttcagatgctgtttccctgcaaaacatgcgagagaatgaatcagaatttcaacatttgcttcacgcacgggaccagagactgttcagaatgtttccccggcgtgtcagaatctcaaccggtcgtcagaaagaggacgtatcggaaactctgtgccattcatcatctgctggggcgggctcccgagattgcttgctcggcctgcgatctggtcaacgtggatctggatgactgtgtttctgagcaataaatgacttaaaccaggtatggctgccgatggttatcttccagattggctcgaggacaacctctctgagggcattcgcgagtggtgggacttgaaacctggagccccgaaacccaaagccaaccagcaaaagcaggacgacggccggggtctggtgcttcctggctacaagtacctcggacccttcaacggactcgacaagggggagcccgtcaacgcggcggatgcagcggccctcgagcacgacaaggcctacgaccagcagctcaaagcgggtgacaatccgtacctgcggtataaccacgccgacgccgagtttcaggagcgtctgcaagaagatacgtcttttgggggcaacctcgggcgagcagtcttccaggccaagaagagggttctcgaaccttttggtctggttgaggaaggtgctaagacggctcctggaaagaaacgtccggtagagcagtcgccacaagagccagactcctcctcgggcattggcaagacaggccagcagcccgctaaaaagagactcaattttggtcagactggcgactcagagtcagtccccgacccacaacctctcggagaacctccagcaacccccgctgctgtgggacctactacaatggcttcaggcggtggcgcaccaatggcagacaataacgaaggcgccgacggagtgggtaatgcctcaggaaattggcattgcgattccacatggctgggcgacagagtcatcaccaccagcacccgaacatgggccttgcccacctataacaaccacctctacaagcaaatctccagtgcttcaacgggggccagcaacgacaaccactacttcggctacagcaccccctgggggtattttgatttcaacagattccactgccatttctcaccacgtgactggcagcgactcatcaacaacaattggggattccggcccaagagactcaacttcaagctcttcaacatccaagtcaaggaggtcacgacgaatgatggcgtcacgaccatcgctaataaccttaccagcacggttcaagtcttctcggactcggagtaccagttgccgtacgtcctcggctctgcgcaccagggctgcctccctccgttcccggcggacgtgttcatgattccgcagtacggctacctaacgctcaacaatggcagccaggcagtgggacggtcatccttttactgcctggaatatttcccatcgcagatgctgagaacgggcaataactttaccttcagctacaccttcgaggacgtgcctttccacagcagctacgcgcacagccagagcctggaccggctgatgaatcctctcatcgaccagtacctgtattacctgaacagaactcagaatcagtccggaagtgcccaaaacaaggacttgctgtttagccgggggtctccagctggcatgtctgttcagcccaaaaactggctacctggaccctgttaccggcagcagcgcgtttctaaaacaaaaacagacaacaacaacagcaactttacctggactggtgcttcaaaatataaccttaatgggcgtgaatctataatcaaccctggcactgctatggcctcacacaaagacgacaaagacaagttctttcccatgagcggtgtcatgatttttggaaaggagagcgccggagcttcaaacactgcattggacaatgtcatgatcacagacgaagaggaaatcaaagccactaaccccgtggccaccgaaagatttgggactgtggcagtcaatctccagagcagcagcacagaccctgcgaccggagatgtgcatgttatgggagccttacctggaatggtgtggcaagacagagacgtatacctgcagggtcctatttgggccaaaattcctcacacggatggacactttcacccgtctcctctcatgggcggctttggacttaagcacccgcctcctcagatcctcatcaaaaacacgcctgttcctgcgaatcctccggcagagttttcggctacaaagtttgcttcattcatcacccagtattccacaggacaagtgagcgtggagattgaatgggagctgcagaaagaaaacagcaaacgctggaatcccgaagtgcagtatacatctaactatgcaaaatctgccaacgttgatttcactgtggacaacaatggactttatactgagcctcgccccattggcacccgttacctcacccgtcccctgtaattgtgtgttaatcaataaaccggttaattcgtgtcagttgaactttggtctcatgtcgttattatcttatctggtcaccatagcaaccggttacacattaactgcttagttgcgcttcgcgaatacccctagtgatggagttgcccactccctctatgcgcgctcgctcgctcggtggggccggcagagcagagctctgccgtctgcggacctttggtccgcaggccccaccgagcgagcgagcgcgcatagagggagtgggcaa

SEQ ID NO: 126 - DNA, 2211 bp, Adeno-associated virus 6
  source 1..2211: mol_type = unassigned DNA
atggctgccgatggttatcttccagattggctcgaggacaacctctctgagggcattcgcgagtggtgggacttgaaacctggagccccgaaacccaaagccaaccagcaaaagcaggacgacggccggggtctggtgcttcctggctacaagtacctcggacccttcaacggactcgacaagggggagcccgtcaacgcggcggatgcagcggccctcgagcacgacaaggcctacgaccagcagctcaaagcgggtgacaatccgtacctgcggtataaccacgccgacgccgagtttcaggagcgtctgcaagaagatacgtcttttgggggcaacctcgggcgagcagtcttccaggccaagaagagggttctcgaaccttttggtctggttgaggaaggtgctaagacggctcctggaaagaaacgtccggtagagcagtcgccacaagagccagactcctcctcgggcattggcaagacaggccagcagcccgctaaaaagagactcaattttggtcagactggcgactcagagtcagtccccgacccacaacctctcggagaacctccagcaacccccgctgctgtgggacctactacaatggcttcaggcggtggcgcaccaatggcagacaataacgaaggcgccgacggagtgggtaatgcctcaggaaattggcattgcgattccacatggctgggcgacagagtcatcaccaccagcacccgaacatgggccttgcccacctataacaaccacctctacaagcaaatctccagtgcttcaacgggggccagcaacgacaaccactacttcggctacagcaccccctgggggtattttgatttcaacagattccactgccatttctcaccacgtgactggcagcgactcatcaacaacaattggggattccggcccaagagactcaacttcaagctcttcaacatccaagtcaaggaggtcacgacgaatgatggcgtcacgaccatcgctaataaccttaccagcacggttcaagtcttctcggactcggagtaccagttgccgtacgtcctcggctctgcgcaccagggctgcctccctccgttcccggcggacgtgttcatgattccgcagtacggctacctaacgctcaacaatggcagccaggcagtgggacggtcatccttttactgcctggaatatttcccatcgcagatgctgagaacgggcaataactttaccttcagctacaccttcgaggacgtgcctttccacagcagctacgcgcacagccagagcctggaccggctgatgaatcctctcatcgaccagtacctgtattacctgaacagaactcagaatcagtccggaagtgcccaaaacaaggacttgctgtttagccgggggtctccagctggcatgtctgttcagcccaaaaactggctacctggaccctgttaccggcagcagcgcgtttctaaaacaaaaacagacaacaacaacagcaactttacctggactggtgcttcaaaatataaccttaatgggcgtgaatctataatcaaccctggcactgctatggcctcacacaaagacgacaaagacaagttctttcccatgagcggtgtcatgatttttggaaaggagagcgccggagcttcaaacactgcattggacaatgtcatgatcacagacgaagaggaaatcaaagccactaaccccgtggccaccgaaagatttgggactgtggcagtcaatctccagagcagcagcacagaccctgcgaccggagatgtgcatgttatgggagccttacctggaatggtgtggcaagacagagacgtatacctgcagggtcctatttgggccaaaattcctcacacggatggacactttcacccgtctcctctcatgggcggctttggacttaagcacccgcctcctcagatcctcatcaaaaacacgcctgttcctgcgaatcctccggcagagttttcggctacaaagtttgcttcattcatcacccagtattccacaggacaagtgagcgtggagattgaatgggagctgcagaaagaaaacagcaaacgctggaatcccgaagtgcagtatacatctaactatgcaaaatctgccaacgttgatttcactgtggacaacaatggactttatactgagcctcgccccattggcacccgttacctcacccgtcccctgtaa

SEQ ID NO: 127 - protein, 736 aa, Adeno-associated virus; identical to SEQ ID NO: 123

SEQ ID NO: 128 - protein, 736 aa, Adeno-associated virus
MAADGYLPDWLEDNLSEGIREWWDLKPGAPKPKANQQKQDDGRGLVLPGYKYLGPFNGLDKGEPVNAADAAALEHDKAYDQQLKAGDNPYLRYNHADAEFQERLQEDTSFGGNLGRAVFQAKKRVLEPFGLVEEGAKTAPGKKRPVEQSPQEPDSSSGIGKTGQQPAKKRLNFGQTGDSESVPDPQPLGEPPATPAAVGPTTMASGGGAPMADNNEGADGVGNASGNWHCDSTWLGDRVITTSTRTWALPTYNNHLYKQISSASTGASNDNHYFGYSTPWGYFDFNRFHCHFSPRDWQRLINNNWGFRPKRLNFKLFNIQVKEVTTNDGVTTIANNLTSTVQVFSDSEYQLPYVLGSAHQGCLPPFPADVFMIPQYGYLTLNNGSQAVGRSSFYCLEYFPSQMLRTGNNFTFSYTFEDVPFHSSYAHSQSLDRLMNPLIDQYLYYLNRTQNQSGSAQNKDLLFSRGSPAGMSVQPKNWLPGPCYRQQRVSKTKTDNNNSNFTWTGASKYNLNGRESIINPGTAMASHKDDEDKFFPMSGVMIFGKESAGASNTALDNVMITDEEEIKATNPVATERFGTVAVNLQSSSTDPATGDVHVMGALPGMVWQDRDVYLQGPIWAKIPHTDGHFHPSPLMGGFGLKHPPPQILIKNTPVPANPPAEFSATKFASFITQYSTGQVSVEIEWELQKENSKRWNPEVQYTSNYAKSANVDFTVDNNGLYTEPRPIGTRYLTRPL

SEQ ID NO: 129 - protein, 736 aa, Adeno-associated virus
MAADGYLPDWLEDNLSEGIREWWDLKPGAPKPKANQQKQDDGRGLVLPGYKYLGPFNGLDKGEPVNAADAAALEHDKAYDQQLKAGDNPYLRYNHADAEFQERLQEDTSFGGNLGRAVFQAKKRVLEPLGLVEEGAKTAPGKKRPVEQSPQEPDSSSGIGKTGQQPAKKRLNFGQTGDSESVPDPQPLGEPPATPAAVGPTTMASGGGAPMADNNEGADGVGNASGNWHCDSTWLGDRVITTSTRTWALPTYNNHLYKQISSASTGASNDNHYFGYSTPWGYFDFNRFHCHFSPRDWQRLINNNWGFRPKRLNFKLFNIQVKEVTTNDGVTTIANNLTSTVQVFSDSEYQLPYVLGSAHQGCLPPFPADVFMIPQYGYLTLNNGSQAVGRSSFYCLEYFPSQMLRTGNNFTFSYTFEDVPFHSSYAHSQSLDRLMNPLIDQYLYYLNRTQNQSGSAQNKDLLFSRGSPAGMSVQPKNWLPGPCYRQQRVSKTKTDNNNSNFTWTGASKYNLNGRESIINPGTAMASHKDDEDKFFPMSGVMIFGKESAGASNTALDNVMITDEEEIKATNPVATERFGTVAVNLQSSSTDPATGDVHVMGALPGMVWQDRDVYLQGPIWAKIPHTDGHFHPSPLMGGFGLKHPPPQILIKNTPVPANPPAEFSATKFASFITQYSTGQVSVEIEWELQKENSKRWNPEVQYTSNYAKSANVDFTVDNNGLYTEPRPIGTRYLTRPL

SEQ ID NO: 130 - protein, 736 aa, Adeno-associated virus
MAADGYLPDWLEDNLSEGIREWWDLKPGAPKPKANQQKQDDGRGLVLPGYKYLGPFNGLDKGEPVNAADAAALEHDKAYDQQLKAGDNPYLRYNHADAEFQERLQEDTSFGGNLGRAVFQAKKRVLEPLGLVEEGAKTAPGKKRPVEQSPQEPDSSSGIGKTGQQPAKKRLNFGQTGDSESVPDPQPLGEPPATPAAVGPTTMASGGGAPMADNNEGADGVGNASGNWHCDSTWLGDRVITTSTRTWALPTYNNHLYKQISSASTGASNDNHYFGYSTPWGYFDFNRFHCHFSPRDWQRLINNNWGFRPKRLNFKLFNIQVKEVTTNDGVTTIANNLTSTVQVFSDSEYQLPYVLGSAHQGCLPPFPADVFMIPQYGYLTLNNGSQAVGRSSFYCLEYFPSQMLRTGNNFTFSYTFEDVPFHSSYAHSQSLDRLMNPLIDQYLYYLNRTQNQSGSAQNKDLLFSRGSPAGMSVQPKNWLPGPCYRQQRVSKTKTDNNNSNFTWTGASKYNLNGRESIINPGTAMASHKDDKDKFFPMSGVMIFGKESAGASNTALDNVMITDEEEIKATNPVATERFGTVAVNLQSSSTDPATGDVHVMGALPGMVWQDRDVYLQGPIWAKIPHTDGHFHPSPLMGGFGLKHPPPQILIKNTPVPANPPAEFSATKFASFITQYSTGQVSVEIEWELQKENSKRWNPEVQYTSNYAKSANVDFTVDNNGLYTEPRPIGTRYLTRPL

SEQ ID NO: 131 - DNA, 2214 bp, Adeno-associated virus 7
  source 1..2214: mol_type = unassigned DNA
atggctgccgatggttatcttccagattggctcgaggacaacctctctgagggcattcgcgagtggtgggacctgaaacctggagccccgaaacccaaagccaaccagcaaaagcaggacaacggccggggtctggtgcttcctggctacaagtacctcggacccttcaacggactcgacaagggggagcccgtcaacgcggcggacgcagcggccctcgagcacgacaaggcctacgaccagcagctcaaagcgggtgacaatccgtacctgcggtataaccacgccgacgccgagtttcaggagcgtctgcaagaagatacgtcatttgggggcaacctcgggcgagcagtcttccaggccaagaagcgggttctcgaacctctcggtctggttgaggaaggcgctaagacggctcctgcaaagaagagaccggtagagccgtcacctcagcgttcccccgactcctccacgggcatcggcaagaaaggccagcagcccgccagaaagagactcaatttcggtcagactggcgactcagagtcagtccccgaccctcaacctctcggagaacctccagcagcgccctctagtgtgggatctggtacagtggctgcaggcggtggcgcaccaatggcagacaataacgaaggtgccgacggagtgggtaatgcctcaggaaattggcattgcgattccacatggctgggcgacagagtcattaccaccagcacccgaacctgggccctgcccacctacaacaaccacctctacaagcaaatctccagtgaaactgcaggtagtaccaacgacaacacctacttcggctacagcaccccctgggggtattttgactttaacagattccactgccacttctcaccacgtgactggcagcgactcatcaacaacaactggggattccggcccaagaagctgcggttcaagctcttcaacatccaggtcaaggaggtcacgacgaatgacggcgttacgaccatcgctaataaccttaccagcacgattcaggtattctcggactcggaataccagctgccgtacgtcctcggctctgcgcaccagggctgcctgcctccgttcccggcggacgtcttcatgattcctcagtacggctacctgactctcaacaatggcagtcagtctgtgggacgttcctccttctactgcctggagtacttcccctctcagatgctgagaacgggcaacaactttgagttcagctacagcttcgaggacgtgcctttccacagcagctacgcacacagccagagcctggaccggctgatgaatcccctcatcgaccagtacttgtactacctggccagaacacagagtaacccaggaggcacagctggcaatcgggaactgcagttttaccagggcgggccttcaactatggccgaacaagccaagaattggttacctggaccttgcttccggcaacaaagagtctccaaaacgctggatcaaaacaacaacagcaactttgcttggactggtgccaccaaatatcacctgaacggcagaaactcgttggttaatcccggcgtcgccatggcaactcacaaggacgacgaggaccgctttttcccatccagcggagtcctgatttttggaaaaactggagcaactaacaaaactacattggaaaatgtgttaatgacaaatgaagaagaaattcgtcctactaatcctgtagccacggaagaatacgggatagtcagcagcaacttacaagcggctaatactgcagcccagacacaagttgtcaacaaccagggagccttacctggcatggtctggcagaaccgggacgtgtacctgcagggtcccatctgggccaagattcctcacacggatggcaactttcacccgtctcctttgatgggcggctttggacttaaacatccgcctcctcagatcctgatcaagaacactcccgttcccgctaatcctccggaggtgtttactcctgccaagtttgcttcgttcatcacacagtacagcaccggacaagtcagcgtggaaatcgagtgggagctgcagaaggaaaacagcaagcgctggaacccggagattcagtacacctccaactttgaaaagcagactggtgtggactttgccgttgacagccagggtgtttactctgagcctcgccctattggcactcgttacctcacccgtaatctgtaa

SEQ ID NO: 132 - protein, 738 aa, Adeno-associated virus 7
MAADGYLPDWLEDNLSEGIREWWALKPGAPKPKANQQKQDDGRGLVLPGYKYLGPFNGLDKGEPVNAADAAALEHDKAYDQQLQAGDNPYLRYNHADAEFQERLQEDTSFGGNLGRAVFQAKKRVLEPLGLVEEGAKTAPGKKRPVEPSPQRSPDSSTGIGKKGQQPARKRLNFGQTGDSESVPDPQPLGEPPAAPSGVGPNTMAAGGGAPMADNNEGADGVGSSSGNWHCDSTWLGDRVITTSTRTWALPTYNNHLYKQISNGTSGGATNDNTYFGYSTPWGYFDFNRFHCHFSPRDWQRLINNNWGFRPKRLSFKLFNIQVKEVTQNEGTKTIANNLTSTIQVFTDSEYQLPYVLGSAHQGCLPPFPADVFMIPQYGYLTLNNGSQAVGRSSFYCLEYFPSQMLRTGNNFQFTYTFEDVPFHSSYAHSQSLDRLMNPLIDQYLYYLSRTQTTGGTANTQTLGFSQGGPNTMANQAKNWLPGPCYRQQRVSTTTGQNNNSNFAWTAGTKYHLNGRNSLANPGIAMATHKDDEERFFPSNGILIFGKQNAARDNADYSDVMLTSEEEIKTTNPVATEEYGIVADNLQQQNTAPQIGTVNSQGALPGMVWQNRDVYLQGPIWAKIPHTDGNFHPSPLMGGFGLKHPPPQILIKNTPVPADPPTTFNQSKLNSFITQYSTGQVSVEIEWELQKENSKRWNPEIQYTSNYYKSTSVDFAVNTEGVYSEPRPIGTRYLTRNL

SEQ ID NO: 133 - protein, 737 aa, Adeno-associated virus 7
MAADGYLPDWLEDNLSEGIREWWDLKPGAPKPKANQQKQDNGRGLVLPGYKYLGPFNGLDKGEPVNAADAAALEHDKAYDQQLKAGDNPYLRYNHADAEFQERLQEDTSFGGNLGRAVFQAKKRVLEPLGLVEEGAKTAPAKKRPVEPSPQRSPDSSTGIGKKGQQPARKRLNFGQTGDSESVPDPQPLGEPPAAPSSVGSGTVAAGGGAPMADNNEGADGVGNASGNWHCDSTWLGDRVITTSTRTWALPTYNNHLYKQISSETAGSTNDNTYFGYSTPWGYFDFNRFHCHFSPRDWQRLINNNWGFRPKKLRFKLFNIQVKEVTTNDGVTTIANNLTSTIQVFSDSEYQLPYVLGSAHQGCLPPFPADVFMIPQYGYLTLNNGSQSVGRSSFYCLEYFPSQMLRTGNNFEFSYSFEDVPFHSSYAHSQSLDRLMNPLIDQYLYYLARTQSNPGGTAGNRELQFYQGGPSTMAEQAKNWLPGPCFRQQRVSKTLDQNNNSNFAWTGATKYHLNGRNSLVNPGVAMATHKDDEDRFFPSSGVLIFGKTGATNKTTLENVLMTNEEEIRPTNPVATEEYGIVSSNLQAANTAAQTQVVNNQGALPGMVWQNRDVYLQGPIWAKIPHTDGNFHPSPLMGGFGLKHPPPQILIKNTPVPANPPEVFTPAKFASFITQYSTGQVSVEIEWELQKENSKRWNPEIQYTSNFEKQTGVDFAVDSQGVYSEPRPIGTRYLTRNL

SEQ ID NO: 134 - protein, 623 aa, Adeno-associated virus 7
MPGFYEIVIKVPSDLDEHLPGISDSFVNWVAEKEWELPPDSDMDLNLIEQAPLTVAEKLQRDFLVQWRRVSKAPEALFFVQFEKGESYFHLHVLVETTGVKSMVLGRFLSQIREKLVQTIYRGVEPTLPNWFAVTKTRNGAGGGNKVVDECYIPNYLLPKTQPELQWAWTNMEEYISACLNLAERKRLVAQHLTHVSQTQEQNKENLNPNSDAPVIRSKTSARYMELVGWLVDRGITSEKQWIQEDQASYISFNAASNSRSQIKAALDNAGKIMALTKSAPDYLVGPSLPADIKTNRIYRILELNGYDPAYAGSVFLGWAQKKFGKRNTIWLFGPATTGKTNIAEAIAHAVPFYGCVNWTNENFPFNDCVDKMVIWWEEGKMTAKVVESAKAILGGSKVRVDQKCKSSAQIDPTPVIVTSNTNMCAVIDGNSTTFEHQQPLQDRMFKFELTRRLEHDFGKVTKQEVKEFFRWASDHVTEVAHEFYVRKGGASKRPAPDDADISEPKRACPSVADPSTSDAEGAPVDFADRYQNKCSRHAGMIQMLFPCKTCERMNQNFNICFTHGVRDCLECFPGVSESQPVVRKKTYRKLCAIHHLLGRAPEIACSACDLVNVDLDDCVSEQ

SEQ ID NO: 135 - DNA, 4721 bp, Adeno-associated virus 7
  source 1..4721: mol_type = unassigned DNA
ttggccactccctctatgcgcgctcgctcgctcggtggggcctgcggaccaaaggtccgcagacggcagagctctgctctgccggccccaccgagcgagcgagcgcgcatagagggagtggccaactccatcactaggggtaccgcgaagcgcctcccacgctgccgcgtcagcgctgacgtaaatcacgtcataggggagtggtcctgtattagctgtcacgtgagtgcttttgcgacattttgcgacaccacgtggccatttgaggtatatatggccgagtgagcgagcaggatctccattttgaccgcgaaatttgaacgagcagcagccatgccgggtttctacgagatcgtgatcaaggtgccgagcgacctggacgagcacctgccgggcatttctgactcgtttgtgaactgggtggccgagaaggaatgggagctgcccccggattctgacatggatctgaatctgatcgagcaggcacccctgaccgtggccgagaagctgcagcgcgacttcctggtccaatggcgccgcgtgagtaaggccccggaggccctgttctttgttcagttcgagaagggcgagagctacttccaccttcacgttctggtggagaccacgggggtcaagtccatggtgctaggccgcttcctgagtcagattcgggagaagctggtccagaccatctaccgcggggtcgagcccacgctgcccaactggttcgcggtgaccaagacgcgtaatggcgccggcggggggaacaaggtggtggacgagtgctacatccccaactacctcctgcccaagacccagcccgagctgcagtgggcgtggactaacatggaggagtatataagcgcgtgtttgaacctggccgaacgcaaacggctcgtggcgcagcacctgacccacgtcagccagacgcaggagcagaacaaggagaatctgaaccccaattctgacgcgcccgtgatcaggtcaaaaacctccgcgcgctacatggagctggtcgggtggctggtggaccggggcatcacctccgagaagcagtggatccaggaggaccaggcctcgtacatctccttcaacgccgcctccaactcgcggtcccagatcaaggccgcgctggacaatgccggcaagatcatggcgctgaccaaatccgcgcccgactacctggtggggccctcgctgcccgcggacattaaaaccaaccgcatctaccgcatcctggagctgaacgggtacgatcctgcctacgccggctccgtctttctcggctgggcccagaaaaagttcgggaagcgcaacaccatctggctgtttgggcccgccaccaccggcaagaccaacattgcggaagccatcgcccacgccgtgcccttctacggctgcgtcaactggaccaatgagaactttcccttcaacgattgcgtcgacaagatggtgatctggtgggaggagggcaagatgacggccaaggtcgtggagtccgccaaggccattctcggcggcagcaaggtgcgcgtggaccaaaagtgcaagtcgtccgcccagatcgaccccacccccgtgatcgtcacctccaacaccaacatgtgcgccgtgattgacgggaacagcaccaccttcgagcaccagcagccgttgcaggaccggatgttcaaatttgaactcacccgccgtctggagcacgactttggcaaggtgacgaagcaggaagtcaaagagttcttccgctgggccagtgatcacgtgaccgaggtggcgcatgagttctacgtcagaaagggcggagccagcaaaagacccgcccccgatgacgcggatataagcgagcccaagcgggcctgcccctcagtcgcggatccatcgacgtcagacgcggaaggagctccggtggactttgccgacaggtaccaaaacaaatgttctcgtcacgcgggcatgattcagatgctgtttccctgcaaaacgtgcgagagaatgaatcagaatttcaacatttgcttcacacacggggtcagagactgtttagagtgtttccccggcgtgtcagaatctcaaccggtcgtcagaaaaaagacgtatcggaaactctgcgcgattcatcatctgctggggcgggcgcccgagattgcttgctcggcctgcgacctggtcaacgtggacctggacgactgcgtttctgagcaataaatgacttaaaccaggtatggctgccgatggttatcttccagattggctcgaggacaacctctctgagggcattcgcgagtggtgggacctgaaacctggagccccgaaacccaaagccaaccagcaaaagcaggacaacggccggggtctggtgcttcctggctacaagtacctcggacccttcaacggactcgacaagggggagcccgtcaacgcggcggacgcagcggccctcgagcacgacaaggcctacgaccagcagctcaaagcgggtgacaatccgtacctgcggtataaccacgccgacgccgagtttcaggagcgtctgcaagaagatacgtcatttgggggcaacctcgggcgagcagtcttccaggccaagaagcgggttctcgaacctctcggtctggttgaggaaggcgctaagacggctcctgcaaagaagagaccggtagagccgtcacctcagcgttcccccgactcctccacgggcatcggcaagaaaggccagcagcccgccagaaagagactcaatttcggtcagactggcgactcagagtcagtccccgaccctcaacctctcggagaacctccagcagcgccctctagtgtgggatctggtacagtggctgcaggcggtggcgcaccaatggcagacaataacgaaggtgccgacggagtgggtaatgcctcaggaaattggcattgcgattccacatggctgggcgacagagtcattaccaccagcacccgaacctgggccctgcccacctacaacaaccacctctacaagcaaatctccagtgaaactgcaggtagtaccaacgacaacacctacttcggctacagcaccccctgggggtattttgactttaacagattccactgccacttctcaccacgtgactggcagcgactcatcaacaacaactggggattccggcccaagaagctgcggttcaagctcttcaacatccaggtcaaggaggtcacgacgaatgacggcgttacgaccatcgctaataaccttaccagcacgattcaggtattctcggactcggaataccagctgccgtacgtcctcggctctgcgcaccagggctgcctgcctccgttcccggcggacgtcttcatgattcctcagtacggctacctgactctcaacaatggcagtcagtctgtgggacgttcctccttctactgcctggagtacttcccctctcagatgctgagaacgggcaacaactttgagttcagctacagcttcgaggacgtgcctttccacagcagctacgcacacagccagagcctggaccggctgatgaatcccctcatcgaccagtacttgtactacctggccagaacacagagtaacccaggaggcacagctggcaatcgggaactgcagttttaccagggcgggccttcaactatggccgaacaagccaagaattggttacctggaccttgcttccggcaacaaagagtctccaaaacgctggatcaaaacaacaacagcaactttgcttggactggtgccaccaaatatcacctgaacggcagaaactcgttggttaatcccggcgtcgccatggcaactcacaaggacgacgaggaccgctttttcccatccagcggagtcctgatttttggaaaaactggagcaactaacaaaactacattggaaaatgtgttaatgacaaatgaagaagaaattcgtcctactaatcctgtagccacggaagaatacgggatagtcagcagcaacttacaagcggctaatactgcagcccagacacaagttgtcaacaaccagggagccttacctggcatggtctggcagaaccgggacgtgtacctgcagggtcccatctgggccaagattcctcacacggatggcaactttcacccgtctcctttgatgggcggctttggacttaaacatccgcctcctcagatcctgatcaagaacactcccgttcccgctaatcctccggaggtgtttactcctgccaagtttgcttcgttcatcacacagtacagcaccggacaagtcagcgtggaaatcgagtgggagctgcagaaggaaaacagcaagcgctggaacccggagattcagtacacctccaactttgaaaagcagactggtgtggactttgccgttgacagccagggtgtttactctgagcctcgccctattggcactcgttacctcacccgtaatctgtaattgcatgttaatcaataaaccggttgattcgtttcagttgaactttggtctcctgtgcttcttatcttatcggtttccatagcaactggttacacattaactgcttgggtgcgcttcacgataagaacactgacgtcaccgcggtacccctagtgatggagttggccactccctctatgcgcgctcgctcgctcggtggggcctgcggaccaaaggtccgcagacggcagagctctgctctgccggccccaccgagcgagcgagcgcgcatagagggagtggccaa

SEQ ID NO: 136 - DNA, 2214 bp, Adeno-associated virus 7; identical to SEQ ID NO: 131
  source 1..2214: mol_type = unassigned DNA

SEQ ID NO: 137 - protein, 737 aa, Adeno-associated virus 7; identical to SEQ ID NO: 133

SEQ ID NO: 138 - DNA, 2217 bp, Adeno-associated virus 8
  source 1..2217: mol_type = unassigned DNA
atggctgccgatggttatcttccagattggctcgaggacaacctctctgagggcattcgcgagtggtgggcgctgaaacctggagccccgaagcccaaagccaaccagcaaaagcaggacgacggccggggtctggtgcttcctggctacaagtacctcggacccttcaacggactcgacaagggggagcccgtcaacgcggcggacgcagcggccctcgagcacgacaaggcctacgaccagcagctgcaggcgggtgacaatccgtacctgcggtataaccacgccgacgccgagtttcaggagcgtctgcaagaagatacgtcttttgggggcaacctcgggcgagcagtcttccaggccaagaagcgggttctcgaacctctcggtctggttgaggaaggcgctaagacggctcctggaaagaagagaccggtagagccatcaccccagcgttctccagactcctctacgggcatcggcaagaaaggccaacagcccgccagaaaaagactcaattttggtcagactggcgactcagagtcagttccagaccctcaacctctcggagaacctccagcagcgccctctggtgtgggacctaatacaatggctgcaggcggtggcgcaccaatggcagacaataacgaaggcgccgacggagtgggtagttcctcgggaaattggcattgcgattccacatggctgggcgacagagtcatcaccaccagcacccgaacctgggccctgcccacctacaacaaccacctctacaagcaaatctccaacgggacatcgggaggagccaccaacgacaacacctacttcggctacagcaccccctgggggtattttgactttaacagattccactgccacttttcaccacgtgactggcagcgactcatcaacaacaactggggattccggcccaagagactcagcttcaagctcttcaacatccaggtcaaggaggtcacgcagaatgaaggcaccaagaccatcgccaataacctcaccagcaccatccaggtgtttacggactcggagtaccagctgccgtacgttctcggctctgcccaccagggctgcctgcctccgttcccggcggacgtgttcatgattccccagtacggctacctaacactcaacaacggtagtcaggccgtgggacgctcctccttctactgcctggaatactttccttcgcagatgctgagaaccggcaacaacttccagtttacttacaccttcgaggacgtgcctttccacagcagctacgcccacagccagagcttggaccggctgatgaatcctctgattgaccagtacctgtactacttgtctcggactcaaacaacaggaggcacggcaaatacgcagactctgggcttcagccaaggtgggcctaatacaatggccaatcaggcaaagaactggctgccaggaccctgttaccgccaacaacgcgtctcaacgacaaccgggcaaaacaacaatagcaactttgcctggactgctgggaccaaataccatctgaatggaagaaattcattggctaatcctggcatcgctatggcaacacacaaagacgacgaggagcgtttttttcccagtaacgggatcctgatttttggcaaacaaaatgctgccagagacaatgcggattacagcgatgtcatgctcaccagcgaggaagaaatcaaaaccactaaccctgtggctacagaggaatacggtatcgtggcagataacttgcagcagcaaaacacggctcctcaaattggaactgtcaacagccagggggccttacccggtatggtctggcagaaccgggacgtgtacctgcagggtcccatctgggccaagattcctcacacggacggcaacttccacccgtctccgctgatgggcggctttggcctgaaacatcctccgcctcagatcctgatcaagaacacgcctgtacctgcggatcctccgaccaccttcaaccagtcaaagctgaactctttcatcacgcaatacagcaccggacaggtcagcgtggaaattgaatgggagctgcagaaggaaaacagcaagcgctggaaccccgagatccagtacacctccaactactacaaatctacaagtgtggactttgctgttaatacagaaggcgtgtactctgaaccccgccccattggcacccgttacctcacccgtaatctgtaa

SEQ ID NO: 139 - DNA, 2213 bp, Adeno-associated virus 8
  source 1..2213: mol_type = unassigned DNA
atggctgccgatggttatcttccagattggctcgaggacaacctctctgagggcattcgcgagtggtgggcgctgaaacctggagccccgaagcccaaagccaaccagcaaaagcaggacgacggccggggtctggtgcttcctggctacaagtacctcggacccttcaacggactcgacaagggggagcccgtcaacgcggcggacgcagcggccctcgagcacgacaaggcctacgaccagcagctgcaggcgggtgacaatccgtacctgcggtataaccacgccgacgccgagtttcaggagcgtctgcaagaagatacgtcttttgggggcaacctcgggcgagcagtcttccaggccaagaagcgggttctcgaacctctcggtctggttgaggaaggcgctaagacggctcctggaaagaagagaccggtagagccatcaccccagcgttctccagactcctctacgggcatcggcaagaaaggccaacagcccgccagaaaaagactcaattttggtcagactggcgactcagagtcagttccagaccctcaacctctcggagaacctccagcagcgccctctggtgtgggacctaatacaatggctgcaggcggtggcgcaccaatggcagacaataacgaaggcgccgacggagtgggtagttcctcgggaaattggcattgcgattccacatggctgggcgacagagtcatcaccaccagcacccgaacctgggccctgcccacctacaacaaccacctctacaagcaaatctccaacgggacatcgggaggagccaccaacgacaacacctacttcggctacagcaccccctgggggtattttgactttaacagattccactgccacttttcaccacgtgactggcagcgactcatcaacaacaactggggattccggcccaagagactcagcttcaagctcttcaacatccaggtcaaggaggtcacgcagaatgaaggcaccaagaccatcgccaataacctcaccagcaccatccaggtgtttacggactcggagtaccagctgccgtacgttctcggctctgcccaccagggctgcctgcctccgttcccggcggacgtgttcatgattccccagtacggctacctaacactcaacaacggtagtcaggccgtgggacgctcctccttctactgcctggaatactttccttcgcagatgctgagaaccggcaacaacttccagtttacttacaccttcgaggacgtgcctttccacagcagctacgcccacagccagagcttggaccggctgatgaatcctctgattgaccagtacctgtactacttgtctcggactcaaacaacaggaggcacggcaaatacgcagactctgggcttcagccaaggtgggcctaatacaatggccaatcaggcaaagaactggctgccaggaccctgttaccgccaacaacgcgtctcaacgacaaccgggcaaaacaacaatagcaactttgcctggactgctgggaccaaataccatctgaatggaagaaattcattggctaatcctggcatcgctatggcaacacacaaagacgacgaggagcgtttttttcccagtaacgggatcctgatttttggcaaacaaaatgctgccagagacaatgcggattacagcgatgtcatgctcaccagcgaggaagaaatcaaaaccactaaccctgtggctacagaggaatacggtatcgtggcagataacttgcagcagcaaaacacggctcctcaaattggaactgtcaacagccagggggccttacccggtatggtctggcagaaccgggacgtgtacctgcagggtcccatctgggccaagattcctcacacggacggcaacttccacccgtctccgctgatgggcggctttggcctgaaacatcctccgcctcagatcctgatcaagaacacgcctgtacctgcggatcctccgaccaccttcaaccagtcaaagctgaactctttcatcacgcaatacagcaccggacaggtcagcgtggaaattgaatgggagctgcagaaggaaaacagcaagcgctggaaccccgagatccagtacacctccaactactacaaatctacaagtgtggactttgctgtaatacagaaggcgtgtactctgaaccccgccccattggcacccgttacctcacccgtaatctg

SEQ ID NO: 140 - DNA, 4393 bp, Adeno-associated virus 8
  source 1..4393: mol_type = unassigned DNA
cagagagggagtggccaactccatcactaggggtagcgcgaagcgcctcccacgctgccgcgtcagcgctgacgtaaattacgtcataggggagtggtcctgtattagctgtcacgtgagtgcttttgcggcattttgcgacaccacgtggccatttgaggtatatatggccgagtgagcgagcaggatctccattttgaccgcgaaatttgaacgagcagcagccatgccgggcttctacgagatcgtgatcaaggtgccgagcgacctggacgagcacctgccgggcatttctgactcgtttgtgaactgggtggccgagaaggaatgggagctgcccccggattctgacatggatcggaatctgatcgagcaggcacccctgaccgtggccgagaagctgcagcgcgacttcctggtccaatggcgccgcgtgagtaaggccccggaggccctcttctttgttcagttcgagaagggcgagagctactttcacctgcacgttctggtcgagaccacgggggtcaagtccatggtgctaggccgcttcctgagtcagattcgggaaaagcttggtccagaccatctacccgcggggtcgagccccaccttgcccaactggttcgcggtgaccaaagacgcggtaatggcgccggcgggggggaacaaggtggtggacgagtgctacatccccaactacctcctgcccaagactcagcccgagctgcagtgggcgtggactaacatggaggagtatataagcgcgtgcttgaacctggccgagcgcaaacggctcgtggcgcagcacctgacccacgtcagccagacgcaggagcagaacaaggagaatctgaaccccaattctgacgcgcccgtgatcaggtcaaaaacctccgcgcgctatatggagctggtcgggtggctggtggaccggggcatcacctccgagaagcagtggatccaggaggaccaggcctcgtacatctccttcaacgccgcctccaactcgcggtcccagatcaaggccgcgctggacaatgccggcaagatcatggcgctgaccaaatccgcgcccgactacctggtggggccctcgctgcccgcggacattacccagaaccgcatctaccgcatcctcgctctcaacggctacgaccctgcctacgccggctccgtctttctcggctgggctcagaaaaagttcgggaaacgcaacaccatctggctgtttggacccgccaccaccggcaagaccaacattgcggaagccatcgcccacgccgtgcccttctacggctgcgtcaactggaccaatgagaactttcccttcaatgattgcgtcgacaagatggtgatctggtgggaggagggcaagatgacggccaaggtcgtggagtccgccaaggccattctcggcggcagcaaggtgcgcgtggaccaaaagtgcaagtcgtccgcccagatcgaccccacccccgtgatcgtcacctccaacaccaacatgtgcgccgtgattgacgggaacagcaccaccttcgagcaccagcagcctctccaggaccggatgtttaagttcgaactcacccgccgtctggagcacgactttggcaaggtgacaaagcaggaagtcaaagagttcttccgctgggccagtgatcacgtgaccgaggtggcgcatgagttttacgtcagaaagggcggagccagcaaaagacccgcccccgatgacgcggataaaagcgagcccaagcgggcctgcccctcagtcgcggatccatcgacgtcagacgcggaaggagctccggtggactttgccgacaggtaccaaaacaaatgttctcgtcacgcgggcatgcttcagatgctgtttccctgcaaaacgtgcgagagaatgaatcagaatttcaacatttgcttcacacacggggtcagagactgctcagagtgtttccccggcgtgtcagaatctcaaccggtcgtcagaaagaggacgtatcggaaactctgtgcgattcatcatctgctggggcgggctcccgagattgcttgctcggcctgcgatctggtcaacgtggacctggatgactgtgtttctgagcaataaatgacttaaaccaggtatggctgccgatggttatcttccagattggctcgaggacaacctctctgagggcattcgcgagtggtgggcgctgaaacctggagccccgaagcccaaagccaaccagcaaaagcaggacgacggccggggtctggtgcttcctggctacaagtacctcggacccttcaacggactcgacaagggggagcccgtcaacgcggcggacgcagcggccctcgagcacgacaaggcctacgaccagcagctgcaggcgggtgacaatccgtacctgcggtataaccacgccgacgccgagtttcaggagcgtctgcaagaagatacgtcttttgggggcaacctcgggcgagcagtcttccaggccaagaagcgggttctcgaacctctcggtctggttgaggaaggcgctaagacggctcctggaaagaagagaccggtagagccatcaccccagcgttctccagactcctctacgggcatcggcaagaaaggccaacagcccgccagaaaaagactcaattttggtcagactggcgactcagagtcagttccagaccctcaacctctcggagaacctccagcagcgccctctggtgtgggacctaatacaatggctgcaggcggtggcgcaccaatggcagacaataacgaaggcgccgacggagtgggtagttcctcgggaaattggcattgcgattccacatggctgggcgacagagtcatcaccaccagcacccgaacctgggccctgcccacctacaacaaccacctctacaagcaaatctccaacgggacatcgggaggagccaccaacgacaacacctacttcggctacagcaccccctgggggtattttgactttaacagattccactgccacttttcaccacgtgactggcagcgactcatcaacaacaactggggattccggcccaagagactcagcttcaagctcttcaacatccaggtcaaggaggtcacgcagaatgaaggcaccaagaccatcgccaataacctcaccagcaccatccaggtgtttacggactcggagtaccagctgccgtacgttctcggctctgcccaccagggctgcctgcctccgttcccggcggacgtgttcatgattccccagtacggctacctaacactcaacaacggtagtcaggccgtgggacgctcctccttctactgcctggaatactttccttcgcagatgctgagaaccggcaacaacttccagtttacttacaccttcgaggacgtgcctttccacagcagctacgcccacagccagagcttggaccggctgatgaatcctctgattgaccagtacctgtactacttgtctcggactcaaacaacaggaggcacggcaaatacgcagactctgggcttcagccaaggtgggcctaatacaatggccaatcaggcaaagaactggctgccaggaccctgttaccgccaacaacgcgtctcaacgacaaccgggcaaaacaacaatagcaactttgcctggactgctgggaccaaataccatctgaatggaagaaattcattggctaatcctggcatcgctatggcaacacacaaagacgacgaggagcgtttttttcccagtaacgggatcctgatttttggcaaacaaaatgctgccagagacaatgcggattacagcgatgtcatgctcaccagcgaggaagaaatcaaaaccactaaccctgtggctacagaggaatacggtatcgtggcagataacttgcagcagcaaaacacggctcctcaaattggaactgtcaacagccagggggccttacccggtatggtctggcagaaccgggacgtgtacctgcagggtcccatctgggccaagattcctcacacggacggcaacttccacccgtctccgctgatgggcggctttggcctgaaacatcctccgcctcagatcctgatcaagaacacgcctgtacctgcggatcctccgaccaccttcaaccagtcaaagctgaactctttcatcacgcaatacagcaccggacaggtcagcgtggaaattgaatgggagctgcagaaggaaaacagcaagcgctggaaccccgagatccagtacacctccaactactacaaatctacaagtgtggactttgctgttaatacagaaggcgtgtactctgaaccccgccccattggcacccgttacctcacccgtaatctgtaattgcctgttaatcaataaaccggttgattcgtttcagttgaactttggtctctgcg

SEQ ID NO: 141 - protein, 738 aa, Adeno-associated virus 8; identical to SEQ ID NO: 132

SEQ ID NO: 142 - protein, 737 aa, Adeno-associated virus 8
MAADGYLPDWLEDNLSEGIREWWALKPGAPKPKANQQKQDDGRGLVLPGYKYLGPFNGLDKGEPVNAADAAALEHDKAYDQQLQAGDNPYLRYNHADAEFQERLQEDTSFGGNLGRAVFQAKKRVLEPLGLVEEGAKTAPGKKRPVEPSPQRSPDSSTGIGKKGQQPARKRLNFGQTGDSESVPDPQPLGEPPAAPSGVGPNTMAAGGGAPMADNNEGADGVGSSSGNWHCDSTWLGDRVITTSTRTWALPTYNNHLYKQISNGTSGGATNDNTYFGYSTPWGYFDFNRFHCHFSPRDWQRLINNNWGFRPKRLSFKLFNIQVKEVTQNEGTKTIANNLTSTIQVFTDSEYQLPYVLGSAHQGCLPPFPADVFMIPQYGYLTLNNGSQAVGRSSFYCLEYFPSQMLRTGNNFQFTYTFEDVPFHSSYAHSQSLDRLMNPLIDQYLYYLSRTQTTGGTANTQTLGFSQGGPNTMANQAKNWLPGPCYRQQRVSTTTGQNNNSNFAWTAGTKYHLNGRNSLANPGIAMATHKDDEERFFPSNGILIFGKQNAARDNADYSDVMLTSEEEIKTTNPVATEEYGIVADNLQQQNTAPQIGTVNSQGALPGMVWQNRDVYLQGPIWAKIPHTDGNFHPSPLMGGFGLKHPPPQILIKNTPVPADPPTTFNQSKLNSFITQYSTGQVSVEIEWELQKENSKRWNPEIQYTSNYYKSTSVDFAVIQKACTLNPAPLAPVTSPVI

SEQ ID NO: 143 - DNA, 2217 bp, Adeno-associated virus 8; identical to SEQ ID NO: 138
  source 1..2217: mol_type = unassigned DNA

SEQ ID NO: 144 - DNA, 2214 bp, synthetic construct
  misc_feature 1..2214: note = Description of Artificial Sequence: Synthetic polynucleotide
  source 1..2214: mol_type = other DNA
atggctgccgatggttatcttccagattggctcgaggacaacctctctgagggcattcgcgagtggtgggcgctgaaacctggagccccgaagcccaaagccaaccagcaaaagcaggacgacggccggggtctggtgcttcctggctacaagtacctcggacccttcaacggactcgacaagggggagcccgtcaacgcggcggacgcagcggccctcgagcacgacaaggcctacgaccagcagctgcaggcgggtgacaatccgtacctgcggtataaccacgccgacgccgagtttcaggagcgtctgcaagaagatacgtcttttgggggcaacctcgggcgagcagtcttccaggccaagaagcgggttctcgaacctctcggtctggttgaggaaggcgctaagacggctcctggaaagaagagaccggtagagccatcaccccagcgttctccagactcctctacgggcatcggcaagaaaggccaacagcccgccagaaaaagactcaattttggtcagactggcgactcagagtcagttccagaccctcaacctctcggagaacctccagcagcgccctctggtgtgggacctaatacaatggctgcaggcggtggcgcaccaatggcagacaataacgaaggcgccgacggagtgggtagttcctcgggaaattggcattgcgattccacatggctgggcgacagagtcatcaccaccagcacccgaacctgggccctgcccacctacaacaaccacctctacaagcaaatctccaacgggacatcgggaggagccaccaacgacaacacctacttcggctacagcaccccctgggggtattttgactttaacagattccactgccacttttcaccacgtgactggcagcgactcatcaacaacaactggggattccggcccaagagactcagcttcaagctcttcaacatccaggtcaaggaggtcacgcagaatgaaggcaccaagaccatcgccaataacctcaccagcaccatccaggtgtttacggactcggagtaccagctgccgtacgttctcggctctgcccaccagggctgcctgcctccgttcccggcggacgtgttcatgattccccagtacggctacctaacactcaacaacggtagtcaggccgtgggacgctcctccttctactgcctggaatactttccttcgcagatgctgagaaccggcaacaacttccagtttacttacaccttcgaggacgtgcctttccacagcagctacgcccacagccagagcttggaccggctgatgaatcctctgattgaccagtacctgtactacttgtctcggactcaaacaacaggaggcacggcaaatacgcagactctgggcttcagccaaggtgggcctaatacaatggccaatcaggcaaagaactggctgccaggaccctgttaccgccaacaacgcgtctcaacgacaaccgggcaaaacaacaatagcaactttgcctggactgctgggaccaaataccatctgaatggaagaaattcattggctaatcctggcatcgctatggcaacacacaaagacgacgaggagcgtttttttcccagtaacgggatcctgatttttggcaaacaaaatgctgccagagacaatgcggattacagcgatgtcatgctcaccagcgaggaagaaatcaaaaccactaaccctgtggctacagaggaatacggtatcgtggcagataacttgcctgagcggacggcgatgagtcttccgggaactgtcaacagccagggggccttacccggtatggtctggcagaaccgggacgtgtacctgcagggtcccatctgggccaagattcctcacacggacggcaacttccacccgtctccgctgatgggcggctttggcctgaaacatcctccgcctcagatcctgatcaagaacacgcctgtacctgcggatcctccgaccaccttcaaccagtcaaagctgaactctttcatcacgcaatacagcaccggacaggtcagcgtggaaattgaatgggagctgcagaaggaaaacagcaagcgctggaaccccgagatccagtacacctccaactactacaaatctacaagtgtggactttgctgttaatacagaaggcgtgtactctgaaccccgccccattggcacccgttacctcacccgtaatctg

SEQ ID NO: 145 - protein, 738 aa, synthetic construct
  REGION 1..738: note = Description of Artificial Sequence: Synthetic polypeptide
MAADGYLPDWLEDNLSEGIREWWALKPGAPKPKANQQKQDDGRGLVLPGYKYLGPFNGLDKGEPVNAADAAALEHDKAYDQQLQAGDNPYLRYNHADAEFQERLQEDTSFGGNLGRAVFQAKKRVLEPLGLVEEGAKTAPGKKRPVEPSPQRSPDSSTGIGKKGQQPARKRLNFGQTGDSESVPDPQPLGEPPAAPSGVGPNTMAAGGGAPMADNNEGADGVGSSSGNWHCDSTWLGDRVITTSTRTWALPTYNNHLYKQISNGTSGGATNDNTYFGYSTPWGYFDFNRFHCHFSPRDWQRLINNNWGFRPKRLSFKLFNIQVKEVTQNEGTKTIANNLTSTIQVFTDSEYQLPYVLGSAHQGCLPPFPADVFMIPQYGYLTLNNGSQAVGRSSFYCLEYFPSQMLRTGNNFQFTYTFEDVPFHSSYAHSQSLDRLMNPLIDQYLYYLSRTQTTGGTANTQTLGFSQGGPNTMANQAKNWLPGPCYRQQRVSTTTGQNNNSNFAWTAGTKYHLNGRNSLANPGIAMATHKDDEERFFPSNGILIFGKQNAARDNADYSDVMLTSEEEIKTTNPVATEEYGIVADNLPERTAMSLPGTVNSQGALPGMVWQNRDVYLQGPIWAKIPHTDGNFHPSPLMGGFGLKHPPPQILIKNTPVPADPPTTFNQSKLNSFITQYSTGQVSVEIEWELQKENSKRWNPEIQYTSNYYKSTSVDFAVNTEGVYSEPRPIGTRYLTRNL

SEQ ID NO: 146 - DNA, 2214 bp, synthetic construct
  misc_feature 1..2214: note = Description of Artificial Sequence: Synthetic polynucleotide
  source 1..2214: mol_type = other DNA
atggctgccgatggttatcttccagattggctcgaggacaacctctctgagggcattcgcgagtggtgggcgctgaaacctggagccccgaagcccaaagccaaccagcaaaagcaggacgacggccggggtctggtgcttcctggctacaagtacctcggacccttcaacggactcgacaagggggagcccgtcaacgcggcggacgcagcggccctcgagcacgacaaggcctacgaccagcagctgcaggcgggtgacaatccgtacctgcggtataaccacgccgacgccgagtttcaggagcgtctgcaagaagatacgtcttttgggggcaacctcgggcgagcagtcttccaggccaagaagcgggttctcgaacctctcggtctggttgaggaaggcgctaagacggctcctggaaagaagagaccggtagagccatcaccccagcgttctccagactcctctacgggcatcggcaagaaaggccaacagcccgccagaaaaagactcaattttggtcagactggcgactcagagtcagttccagaccctcaacctctcggagaacctccagcagcgccctctggtgtgggacctaatacaatggctgcaggcggtggcgcaccaatggcagacaataacgaaggcgccgacggagtgggtagttcctcgggaaattggcattgcgattccacatggctgggcgacagagtcatcaccaccagcacccgaacctgggccctgcccacctacaacaaccacctctacaagcaaatctccaacgggacatcgggaggagccaccaacgacaacacctacttcggctacagcaccccctgggggtattttgactttaacagattccactgccacttttcaccacgtgactggcagcgactcatcaacaacaactggggattccggcccaagagactcagcttcaagctcttcaacatccaggtcaaggaggtcacgcagaatgaaggcaccaagaccatcgccaataacctcaccagcaccatccaggtgtttacggactcggagtaccagctgccgtacgttctcggctctgcccaccagggctgcctgcctccgttcccggcggacgtgttcatgattccccagtacggctacctaacactcaacaacggtagtcaggccgtgggacgctcctccttctactgcctggaatactttccttcgcagatgctgagaaccggcaacaacttccagtttacttacaccttcgaggacgtgcctttccacagcagctacgcccacagccagagcttggaccggctgatgaatcctctgattgaccagtacctgtactacttgtctcggactcaaacaacaggaggcacggcaaatacgcagactctgggcttcagccaaggtgggcctaatacaatggccaatcaggcaaagaactggctgccaggaccctgttaccgccaacaacgcgtctcaacgacaaccgggcaaaacaacaatagcaactttgcctggactgctgggaccaaataccatctgaatggaagaaattcattggctaatcctggcatcgctatggcaacacacaaagacgacgaggagcgtttttttcccagtaacgggatcctgatttttggcaaacaaaatgctgccagagacaatgcggattacagcgatgtcatgctcaccagcgaggaagaaatcaaaaccactaaccctgtggctacagaggaatacggtatcgtggcagataacttgagttttagtcgtgcggttctttgtgatggaactgtcaacagccagggggccttacccggtatggtctggcagaaccgggacgtgtacctgcagggtcccatctgggccaagattcctcacacggacggcaacttccacccgtctccgctgatgggcggctttggcctgaaacatcctccgcctcagatcctgatcaagaacacgcctgtacctgcggatcctccgaccaccttcaaccagtcaaagctgaactctttcatcacgcaatacagcaccggacaggtcagcgtggaaattgaatgggagctgcagaaggaaaacagcaagcgctggaaccccgagatccagtacacctccaactactacaaatctacaagtgtggactttgctgttaatacagaaggcgtgtactctgaaccccgccccattggcacccgttacctcacccgtaatctg

SEQ ID NO: 147 - protein, 738 aa, synthetic construct
  REGION 1..738: note = Description of Artificial Sequence: Synthetic polypeptide
MAADGYLPDWLEDNLSEGIREWWALKPGAPKPKANQQKQDDGRGLVLPGYKYLGPFNGLDKGEPVNAADAAALEHDKAYDQQLQAGDNPYLRYNHADAEFQERLQEDTSFGGNLGRAVFQAKKRVLEPLGLVEEGAKTAPGKKRPVEPSPQRSPDSSTGIGKKGQQPARKRLNFGQTGDSESVPDPQPLGEPPAAPSGVGPNTMAAGGGAPMADNNEGADGVGSSSGNWHCDSTWLGDRVITTSTRTWALPTYNNHLYKQISNGTSGGATNDNTYFGYSTPWGYFDFNRFHCHFSPRDWQRLINNNWGFRPKRLSFKLFNIQVKEVTQNEGTKTIANNLTSTIQVFTDSEYQLPYVLGSAHQGCLPPFPADVFMIPQYGYLTLNNGSQAVGRSSFYCLEYFPSQMLRTGNNFQFTYTFEDVPFHSSYAHSQSLDRLMNPLIDQYLYYLSRTQTTGGTANTQTLGFSQGGPNTMANQAKNWLPGPCYRQQRVSTTTGQNNNSNFAWTAGTKYHLNGRNSLANPGIAMATHKDDEERFFPSNGILIFGKQNAARDNADYSDVMLTSEEEIKTTNPVATEEYGIVADNLSFSRAVLCDGTVNSQGALPGMVWQNRDVYLQGPIWAKIPHTDGNFHPSPLMGGFGLKHPPPQILIKNTPVPADPPTTFNQSKLNSFITQYSTGQVSVEIEWELQKENSKRWNPEIQYTSNYYKSTSVDFAVNTEGVYSEPRPIGTRYLTRNL

SEQ ID NO: 148 - DNA, 4385 bp, Adeno-associated virus 9
  source 1..4385: mol_type = unassigned DNA
cagagagggagtggccaactccatcactaggggtaatcgcgaagcgcctcccacgctgccgcgtcagcgctgacgtagattacgtcataggggagtggtcctgtattagctgtcacgtgagtgcttttgcgacattttgcgacaccacatggccatttgaggtatatatggccgagtgagcgagcaggatctccattttgaccgcgaaatttgaacgagcagcagccatgccgggcttctacgagattgtgatcaaggtgccgagcgacctggacgagcacctgccgggcatttctgactcttttgtgaactgggtggccgagaaggaatgggagctgcccccggattctgacatggatcggaatctgatcgagcaggcacccctgaccgtggccgagaagctgcagcgcgacttcctggtccaatggcgccgcgtgagtaaggccccggaggccctcttctttgttcagttcgagaagggcgagagctactttcacctgcacgttctggtcgagaccacgggggtcaagtccatggtgctaggccgcttcctgagtcagattcgggagaagctggtccagaccatctaccgcgggatcgagccgaccctgcccaactggttcgcggtgaccaagacgcgtaatggcgccggcggggggaacaaggtggtggacgagtgctacatccccaactacctcctgcccaagactcagcccgagctgcagtgggcgtggactaacatggaggagtatataagcgcgtgcttgaacctggccgagcgcaaacggctcgtggcgcagcacctgacccacgtcagccagacgcaggagcagaacaaggagaatctgaaccccaattctgacgcgcccgtgatcaggtcaaaaacctccgcgcgctacatggagctggtcgggtggctggtggaccggggcatcacctccgagaagcagtggatccaggaggaccaggcctcgtacatctccttcaacgccgcctccaactcgcggtcccagatcaaggccgcgctggacaatgccggcaagatcatggcgctgaccaaatccgcgcccgactacctggtaggcccttcacttccggtggacattacgcagaaccgcatctaccgcatcctgcagctcaacggctacgaccctgcctacgccggctccgtctttctcggctgggcacaaaagaagttcgggaaacgcaacaccatctggctgtttgggccggccaccacgggaaagaccaacatcgcagaagccattgcccacgccgtgcccttctacggctgcgtcaactggaccaatgagaactttcccttcaacgattgcgtcgacaagatggtgatctggtgggaggagggcaagatgacggccaaggtcgtggagtccgccaaggccattctcggcggcagcaaggtgcgcgtggaccaaaagtgcaagtcgtccgcccagatcgaccccactcccgtgatcgtcacctccaacaccaacatgtgcgccgtgattgacgggaacagcaccaccttcgagcaccagcagcctctccaggaccggatgtttaagttcgaactcacccgccgtctggagcacgactttggcaaggtgacaaagcaggaagtcaaagagttcttccgctgggccagtgatcacgtgaccgaggtggcgcatgagttttacgtcagaaagggcggagccagcaaaagacccgcccccgatgacgcggataaaagcgagcccaagcgggcctgcccctcagtcgcggatccatcgacgtcagacgcggaaggagctccggtggactttgccgacaggtaccaaaacaaatgttctcgtcacgcgggcatgcttcagatgctgcttccctgcaaaacgtgcgagagaatgaatcagaatttcaacatttgcttcacacacggggtcagagactgctcagagtgtttccccggcgtgtcagaatctcaaccggtcgtcagaaagaggacgtatcggaaactctgtgcgattcatcatctgctggggcgggctcccgagattgcttgctcggcctgcgatctggtcaacgtggacctggatgactgtgtttctgagcaataaatgacttaaaccaggtatggctgccgatggttatcttccagattggctcgaggacaacctctctgagggcattcgcgagtggtgggcgctgaaacctggagccccgaagcccaaagccaaccagcaaaagcaggacgacggccggggtctggtgcttcctggctacaagtacctcggacccttcaacggactcgacaagggggagcccgtcaacgcggcggacgcagcggccctcgagcacggcaaggcctacgaccagcagctgcaggcgggtgacaatccgtacctgcggtataaccacgccgacgccgagtttcaggagcgtctgcaagaagatacgtcttttgggggcaacctcgggcgagcagtcttccaggccaagaagcgggttctcgaacctctcggtctggttgaggaaggcgctaagacggctcctggaaagaagagaccggtagagccatcaccccagcgttctccagactcctctacgggcatcggcaagaaaggccaacagcccgccagaaaaagactcaattttggtcagactggcgactcagagtcagttccagaccctcaacctctcggagaacctccagcagcgccctctggtgtgggacctaatacaatggctgcaggcggtggcgcaccaatggcagacaataacgaaggcgccgacggagtgggtaattcctcgggaaattggcattgcgattccacatggctgggggacagagtcatcaccaccagcacccgaacctgggcattgcccacctacaacaaccacctctacaagcaaatctccaatggaacatcgggaggaagcaccaacgacaacacctactttggctacagcaccccctgggggtattttgacttcaacagattccactgccacttctcaccacgtgactggcagcgactcatcaacaacaactggggattccggccaaagagactcaacttcaagctgttcaacatccaggtcaaggaggttacgacgaacgaaggcaccaagaccatcgccaataaccttaccagcaccgtccaggtctttacggactcggagtaccagctaccgtacgtcctaggctctgcccaccaaggatgcctgccaccgtttcctgcagacgtcttcatggttcctcagtacggctacctgacgctcaacaatggaagtcaagcgttaggacgttcttctttctactgtctggaatacttcccttctcagatgctgagaaccggcaacaactttcagttcagctacactttcgaggacgtgcctttccacagcagctacgcacacagccagagtctagatcgactgatgaaccccctcatcgaccagtacctatactacctggtcagaacacagacaactggaactgggggaactcaaactttggcattcagccaagcaggccctagctcaatggccaatcaggctagaaactgggtacccgggccttgctaccgtcagcagcgcgtctccacaaccaccaaccaaaataacaacagcaactttgcgtggacgggagctgctaaattcaagctgaacgggagagactcgctaatgaatcctggcgtggctatggcatcgcacaaagacgacgaggaccgcttctttccatcaagtggcgttctcatatttggcaagcaaggagccgggaacgatggagtcgactacagccaggtgctgattacagatgaggaagaaattaaagccaccaaccctgtagccacagaggaatacggagcagtggccatcaacaaccaggccgctaacacgcaggcgcaaactggacttgtgcataaccagggagttattcctggtatggtctggcagaaccgggacgtgtacctgcagggccctatttgggctaaaatacctcacacagatggcaactttcacccgtctcctctgatgggtggatttggactgaaacacccacctccacagattctaattaaaaatacaccagtgccggcagatcctcctcttaccttcaatcaagccaagctgaactctttcatcacgcagtacagcacgggacaagtcagcgtggaaatcgagtgggagctgcagaaagaaaacagcaagcgctggaatccagagatccagtatacttcaaactactacaaatctacaaatgtggactttgctgtcaataccaaaggtgtttactctgagcctcgccccattggtactcgttacctcacccgtaatttgtaattgcctgttaatcaataaaccggttaattcgtttcagttgaactttggtctctgcg

SEQ ID NO: 149 - DNA, 4382 bp, Adeno-associated virus 9
  source 1..4382: mol_type = unassigned DNA
cagagagggagtggccaactccatcactaggggtaatcgcgaagcgcctcccacgctgccgcgtcagcgctgacgtagattacgtcataggggagtggtcctgtattagctgtcacgtgagtgcttttgcgacattttgcgacaccacatggccatttgaggtatatatggccgagtgagcgagcaggatctccattttgaccgcgaaatttgaacgagcagcagccatgccgggcttctacgagattgtgatcaaggtgccgagcgacctggacgagcacctgccgggcatttctgactcttttgtgaactgggtggccgagaaggaatgggagctgcccccggattctgacatggatcggaatctgatcgagcaggcacccctgaccgtggccgagaagctgtagcgcgacttcctggtccaatggcgccgcgtgagtaaggccccggaggccctcttctttgttcagttcgagaagggcgagagctactttcacctgcacgttctggtcgagaccacgggggtcaagtccatggtgctaggccgcttcctgagtcagattcgggagaagctggtccagaccatctaccgcgggatcgagccgaccctgcccaactggttcgcggtgaccaagacgcgtaatggcgccggcggggggaacaaggtggtggacgagtgctacatccccaactacctcctgcccaagactcagcccgagctgcagtgggcgtggactaacatggaggagtatataagcgcgtgcttgaacctggccgagcgcaaacggctcgtggcgcagcacctgacccacgtcagccagacgcaggagcagaacaaggagaatctgaaccccaattctgacgcgcccgtgatcaggtcaaaaacctccgcgcgctacatggagctggtcgggtggctggtggaccggggcatcacctccgagaagcagtggatccaggaggaccaggcctcgtacatctccttcaacgccgcctccaactcgcggtcccagatcaaggccgcgctggacaatgccggcaagatcatggcgctgaccaaatccgcgcccgactacctggtaggcccttcacttccggtggacattacgcagaaccgcatctaccgcatcctgcagctcaacggctacgaccctgcctacgccggctccgtctttctcggctgggcacaaaagaagttcgggaaacgcaacaccatctggctgtttgggccggccaccacgggaaagaccaacatcgcagaagccattgcccacgccgtgcccttctacggctgcgtcaactggaccaatgagaactttcccttcaacgattgcgtcgacaagatggtgatctggtgggaggagggcaagatgacggccaaggtcgtggagtccgccaaggccattctcggcggcagcaaggtgcgcgtggaccaaaagtgcaagtcgtccgcccagatcgaccccactcccgtgatcgtcacctccaacaccaacatgtgcgccgtgattgacgggaacagcaccaccttcgagcaccagcagcctctccaggaccggatgtttaagttcgaactcacccgccgtctggagcacgactttggcaaggtgacaaagcaggaagtcaaagagttcttccgctgggccagtgatcacgtgaccgaggtggcgcatgagttttacgtcagaaagggcggagccagcaaaagacccgcccccgatgacgcggataaaagcgagcccaagcgggcctgcccctcagtcgcggatccatcgacgtcagacgcggaaggagctccggtggactttgccgacaggtaccaaaacaaatgttctcgtcacgcgggcatgcttcagatgctgcttccctgcaaaacgtgcgagagaatgaatcagaatttcaacatttgcttcacacacggggtcagagactgctcagagtgtttccccggcgtgtcagaatctcaaccggtcgtcagaaagaggacgtatcggaaactctgtgcgattcatcatctgctggggcgggctcccgagattgcttgctcggcctgcgatctggtcaacgtggacctggatgactgtgtttctgagcaataaatgacttaaaccaggtatggctgccgatggttatcttccagattggctcgaggacaacctctctgagggcattcgcgagtggtgggacctgaaacctggagccccgaaacccaaagccaaccagcaaaagcaggacgacggccggggtctggtgcttcctggctacaagtacctcggacccttcaacggactcgacaagggggagcccgtcaacgcggcggacgcagcggccctcgagcacgacaaggcctacgaccagcagctcaaagcgggtgacaatccgtacctgcggtataaccacgccgacgccgagtttcaggagcgtctgcaagaagatacgtcttttgggggcaacctcgggcgagcagtcttccaggccaagaagcgggttctcgaacctctcggtctggttgaggaaggcgctaagacggctcctggaaagaagagaccggtagagcagtcaccccaagaaccagactcatcctcgggcatcggcaaatcaggccagcagcccgctaaaaagagactcaattttggtcagactggcgactcagagtcagtccccgacccacaacctctcggagaacctccagaagccccctcaggtctgggacctaatacaatggcttcaggcggtggcgctccaatggcagacaataacgaaggcgccgacggagtgggtaattcctcgggaaattggcattgcgattccacatggctgggggacagagtcatcaccaccagcacccgaacctgggcattgcccacctacaacaaccacctctacaagcaaatctccaatggaacatcgggaggaagcaccaacgacaacacctactttggctacagcaccccctgggggtattttgacttcaacagattccactgccacttctcaccacgtgactggcagcgactcatcaacaacaactggggattccggccaaagagactcaacttcaagctgttcaacatccaggtcaaggaggttacgacgaacgaaggcaccaagaccatcgccaataaccttaccagcaccgtccaggtctttacggactcggagtaccagctaccgtacgtcctaggctctgcccaccaaggatgcctgccaccgtttcctgcagacgtcttcatggttcctcagtacggctacctgacgctcaacaatggaagtcaagcgttaggacgttcttctttctactgtctggaatacttcccttctcagatgctgagaaccggcaacaactttcagttcagctacactttcgaggacgtgcctttccacagcagctacgcacacagccagagtctagatcgactgatgaaccccctcatcgaccagtacctatactacctggtcagaacacagacaactggaactgggggaactcaaactttggcattcagccaagcaggccctagctcaatggccaatcaggctagaaactgggtacccgggccttgctaccgtcagcagcgcgtctccacaaccaccaaccaaaataacaacagcaactttgcgtggacgggagctgctaaattcaagctgaacgggagagactcgctaatgaatcctggcgtggctatggcatcgcacaaagacgacgaggaccgcttctttccatcaagtggcgttctcatatttggcaagcaaggagccgggaacgatggagtcgactacagccaggtgctgattacagatgaggaagaaattaaagccaccaaccctgtagccacagaggaatacggagcagtggccatcaacaaccaggccgctaacacgcaggcgcaaactggacttgtgcataaccagggagttattcctggtatggtctggcagaaccgggacgtgtacctgcagggccctatttgggctaaaatacctcacacagatggcaactttcacccgtctcctctgatgggtggatttggactgaaacacccacctccacagattctaattaaaaatacaccagtgccggcagatcctcctcttaccttcaatcaagccaagctgaactctttcatcacgcagtacagcacgggacaagtcagcgtggaaatcgagtgggagctgcagaaagaaaacagcaagcgctggaatccagagatccagtatacttcaaactactacaaatctacaaatgtggactttgctgtcaataccgaaggtgtttactctgagcctcgccccattggtactcgttacctcacccgtaatttgtaattgcctgttaatcaataaaccggttaattcgtttcagttgaactttggtctctgcg

SEQ ID NO: 150 - protein, 736 aa, Adeno-associated virus 9
MAADGYLPDWLEDNLSEGIREWWALKPGAPQPKANQQHQDNARGLVLPGYKYLGPGNGLDKGEPVNAADAAALEHDKAYDQQLKAGDNPYLKYNHADAEFQERLKEDTSFGGNLGRAVFQAKKRLLEPLGLVEEAAKTAPGKKRPVEQSPQEPDSSAGIGKSGAQPAKKRLNFGQTGDTESVPDPQPIGEPPAAPSGVGSLTMASGGGAPVADNNEGADGVGSSSGNWHCDSQWLGDRVITTSTRTWALPTYNNHLYKQISNSTSGGSSNDNAYFGYSTPWGYFDFNRFHCHFSPRDWQRLINNNWGFRPKRLNFKLFNIQVKEVTDNNGVKTIANNLTSTVQVFTDSDYQLPYVLGSAHEGCLPPFPADVFMIPQYGYLTLNDGSQAVGRSSFYCLEYFPSQMLRTGNNFQFSYEFENVPFHSSYAHSQSLDRLMNPLIDQYLYYLSKTINGSGQNQQTLKFSVAGPSNMAVQGRNYIPGPSYRQQRVSTTVTQNNNSEFAWPGASSWALNGRNSLMNPGPAMASHKEGEDRFFPLSGSLIFGKQGTGRDNVDADKVMITNEEEIKTTNPVATESYGQVATNHQSAQAQAQTGWVQNQGILPGMVWQDRDVYLQGPIWAKIPHTDGNFHPSPLMGGFGMKHPPPQILIKNTPVPADPPTAFNKDKLNSFITQYSTGQVSVEIEWELQKENSKRWNPEIQYTSNYYKSNNVEFAVNTEGVYSEPRPIGTRYLTRNL

SEQ ID NO: 151 - protein, 736 aa, Adeno-associated virus 9
MAADGYLPDWLEDNLSEGIREWWDLKPGAPKPKANQQKQDDGRGLVLPGYKYLGPFNGLDKGEPVNAADAAALEHDKAYDQQLKAGDNPYLRYNHADAEFQERLQEDTSFGGNLGRAVFQAKKRVLEPLGLVEEGAKTAPGKKRPVEQSPQEPDSSSGIGKSGQQPAKKRLNFGQTGDSESVPDPQPLGEPPEAPSGLGPNTMASGGGAPMADNNEGADGVGNSSGNWHCDSTWLGDRVITTSTRTWALPTYNNHLYKQISNGTSGGSTNDNTYFGYSTPWGYFDFNRFHCHFSPRDWQRLINNNWGFRPKRLNFKLFNIQVKEVTTNEGTKTIANNLTSTVQVFTDSEYQLPYVLGSAHQGCLPPFPADVFMVPQYGYLTLNNGSQALGRSSFYCLEYFPSQMLRTGNNFQFSYTFEDVPFHSSYAHSQSLDRLMNPLIDQYLYYLVRTQTTGTGGTQTLAFSQAGPSSMANQARNWVPGPCYRQQRVSTTTNQNNNSNFAWTGAAKFKLNGRDSLMNPGVAMASHKDDEDRFFPSSGVLIFGKQGAGNDGVDYSQVLITDEEEIKATNPVATEEYGAVAINNQAANTQAQTGLVHNQGVIPGMVWQNRDVYLQGPIWAKIPHTDGNFHPSPLMGGFGLKHPPPQILIKNTPVPADPPLTFNQAKLNSFITQYSTGQVSVEIEWELQKENSKRWNPEIQYTSNYYKSTNVDFAVNTEGVYSEPRPIGTRYLTRNL

SEQ ID NO: 152 - protein, 623 aa, Adeno-associated virus 9
MPGFYEIVIKVPSDLDEHLPGISDSFVNWVAEKEWELPPDSDMDRNLIEQAPLTVAEKLQRDFLVQWRRVSKAPEALFFVQFEKGESYFHLHVLVETTGVKSMVLGRFLSQIREKLVQTIYRGIEPTLPNWFAVTKTRNGAGGGNKVVDECYIPNYLLPKTQPELQWAWTNMEEYISACLNLAERKRLVAQHLTHVSQTQEQNKENLNPNSDAPVIRSKTSARYMELVGWLVDRGITSEKQWIQEDQASYISFNAASNSRSQIKAALDNAGKIMALTKSAPDYLVGPSLPVDITQNRIYRILQLNGYDPAYAGSVFLGWAQKKFGKRNTIWLFGPATTGKTNIAEAIAHAVPFYGCVNWTNENFPFNDCVDKMVIWWEEGKMTAKVVESAKAILGGSKVRVDQKCKSSAQIDPTPVIVTSNTNMCAVIDGNSTTFEHQQPLQDRMFKFELTRRLEHDFGKVTKQEVKEFFRWASDHVTEVAHEFYVRKGGASKRPAPDDADKSEPKRACPSVADPSTSDAEGAPVDFADRYQNKCSRHAGMLQMLLPCKTCERMNQNFNICFTHGVRDCSECFPGVSESQPVVRKRTYRKLCAIHHLLGRAPEIACSACDLVNVDLDDCVSEQ

SEQ ID NO: 153 - DNA, 2211 bp, Adeno-associated virus
  source 1..2211: mol_type = unassigned DNA
atggctgccgatggttatcttccagattggctcgaggacaaccttagtgaaggaattcgcgagtggtgggctttgaaacctggagcccctcaacccaaggcaaatcaacaacatcaagacaacgctcgaggtcttgtgcttccgggttacaaataccttggacccggcaacggactcgacaagggggagccggtcaacgcagcagacgcggcggccctcgagcacgacaaggcctacgaccagcagctcaaggccggagacaacccgtacctcaagtacaaccacgccgacgccgagttccaggagcggctcaaagaagatacgtcttttgggggcaacctcgggcgagcagtcttccaggccaaaaagaggcttcttgaacctcttggtctggttgaggaagcggctaagacggctcctggaaagaagaggcctgtagagcagtctcctcaggaaccggactcctccgcgggtattggcaaatcgggtgcacagcccgctaaaaagagactcaatttcggtcagactggcgacacagagtcagtcccagaccctcaaccaatcggagaacctcccgcagccccctcaggtgtgggatctcttacaatggcttcaggtggtggcgcaccagtggcagacaataacgaaggtgccgatggagtgggtagttcctcgggaaattggcattgcgattcccaatggctgggggacagagtcatcaccaccagcacccgaacctgggccctgcccacctacaacaatcacctctacaagcaaatctccaacagcacatctggaggatcttcaaatgacaacgcctacttcggctacagcaccccctgggggtattttgacttcaacagattccactgccacttctcaccacgtgactggcagcgactcatcaacaacaactggggattccggcctaagcgactcaacttcaagctcttcaacattcaggtcaaagaggttacggacaacaatggagtcaagaccatcgccaataaccttaccagcacggtccaggtcttcacggactcagactatcagctcccgtacgtgctcgggtcggctcacgagggctgcctcccgccgttcccagcggacgttttcatgattcctcagtacgggtatctgacgcttaatgatggaagccaggccgtgggtcgttcgtccttttactgcctggaatatttcccgtcgcaaatgctaagaacgggtaacaacttccagttcagctacgagtttgagaacgtacctttccatagcagctacgctcacagccaaagcctggaccgactaatgaatccactcatcgaccaatacttgtactatctctcaaagactattaacggttctggacagaatcaacaaacgctaaaattcagtgtggccggacccagcaacatggctgtccagggaagaaactacatacctggacccagctaccgacaacaacgtgtctcaaccactgtgactcaaaacaacaacagcgaatttgcttggcctggagcttcttcttgggctctcaatggacgtaatagcttgatgaatcctggacctgctatggccagccacaaagaaggagaggaccgtttctttcctttgtctggatctttaatttttggcaaacaaggaactggaagagacaacgtggatgcggacaaagtcatgataaccaacgaagaagaaattaaaactactaacccggtagcaacggagtcctatggacaagtggccacaaaccaccagagtgcccaagcacaggcgcagaccggctgggttcaaaaccaaggaatacttccgggtatggtttggcaggacagagatgtgtacctgcaaggacccatttgggccaaaattcctcacacggacggcaactttcacccttctccgctgatgggagggtttggaatgaagcacccgcctcctcagatcctcatcaaaaacacacctgtacctgcggatcctccaacggccttcaacaaggacaagctgaactctttcatcacccagtattctactggccaagtcagcgtggagatcgagtgggagctgcagaaggaaaacagcaagcgctggaacccggagatccagtacacttccaactattacaagtctaataatgttgaatttgctgttaatactgaaggtgtatatagtgaaccccgccccattggcaccagatacctgactcgtaatctgtaa

SEQ ID NO: 154 - protein, 736 aa, Adeno-associated virus; identical to SEQ ID NO: 150

SEQ ID NO: 155 - DNA, 2460 bp, Adeno-associated virus
  source 1..2460: mol_type = unassigned DNA
ggtaattcctccggaaattggcattgcgattccacatggctgggcgaccgagtcattaccaccagcacccggacttgggccctgcccacctacaacaaccacctctacaagcaaatctccagccaatcgggtgccaccaacgacaaccactacttcggctacagcaccccttgggggtattttgatttcaacagattccactgccatttctcaccacgtgactggcagcgactcatcaacaacaactggggattcatggctgccgatggttatcttccagattggctcgaggacactctctctgaaggaatcagacagtggtggaagctcaaacctggcccaccaccgccgaaacctaaccaacaacaccgggacgacagtaggggtcttgtgcttcctgggtacaagtacctcggacccttcaacggactcgacaaaggagagccggtcaacgaggcagacgccgcggccctcgagcacgacaaagcctacgaccaccagctcaagcaaggggacaacccgtacctcaaatacaaccacgcggacgctgaatttcaggagcgtcttcaagaagatacgtctttcgggggcaacctcgggcgagcagtcttccaggccaaaaagagggtactcgagcctcttggtctggttgaggaagctgttaagacggctcctggaaaaaagagacctatagagcagtctcctgcagaaccggactcttcctcgggcatcggcaaatcaggccagcagcccgctaagaaaagactcaattttggtcagactggcgacacagagtcagtcccagaccctcaaccaatcggagaaccccccgcagccccctctggtgtgggatctaatacaatggcttcaggcggtggggcaccaatggcagacaataacgaaggcgccgacggagtgggtaattcctcgggaaattggcattgcgattccacatggatgggcgacagagttatcaccaccagcacaagaacctgggccctccccacctacaataatcacctctacaagcaaatctccagcgaatcgggagccaccaacgacaaccactacttcggctacagcaccccctgggggtattttgactttaacagattccactgtcacttctcaccacgtgactggcagcgactcatcaacaacaactggggatttagacccaagaaactcaatttcaagctcttcaacatccaagtcaaggaggtcacgcagaatgatggaaccacgaccatcgccaataaccttaccagcacggtgcaggtcttcacagactctgagtaccagctgccctacgtcctcggttcggctcaccagggctgccttccgccgttcccagcagacgtcttcatgattcctcagtacggctacttgactctgaacaatggcagccaagcggtaggacgttcttcattctactgtctagagtattttccctctcagatgctgaggacgggaaacaacttcaccttcagctacacttttgaagacgtgcctttccacagcagctacgcgcacagccagagtctggatcggctgatgaatcctctcattgaccagtacctgtattacctgagcaaaactcagggtacaagtggaacaacgcagcaatcgagactgcagttcagccaagctgggcctagctccatggctcagcaggccaaaaactggctaccgggacccagctaccgacagcagcgaatgtctaagacggctaatgacaacaacaacagtgaatttgcttggactgcagccaccaaatattacctgaatggaagaaattctctggtcaatcccgggcccccaatggccagtcacaaggacgatgaggaaaagtatttccccatgcacggaaatctcatctttggaaaacaaggcacaggaactaccaatgtggacattgaatcagtgcttattacagacgaagaagaaatcagaacaactaatcctgtggctacagaacaatacggacaggttgccaccaaccatcagagtcagaacaccacagcttcctatggaagtgtggacagccagggaatcttacctggaatggtgtggcaggaccgcgatgtctatcttcaaggtcccatttgggccaaaactcctcacacggacggacactttcatccttctccgctcatgggaggctttggactgaaacaccctcctccccagatcctgatcaaaaacacacctgtgccagcgaatcccgcgaccactttcactcctggaaagtttgcttcgttcattacccagtattccaccggacaggtcagcgtggaaatagagtgggagctgcagaaagaaaacagcaaacgctggaacccagaaattcagtacacctccaactacaacaagtcggtgaatgtggagtttaccgtggacgcaaacggtgtttattctgaaccccgccctattggcactcgttaccttacccggaacttg

SEQ ID NO: 156 - DNA, 3123 bp, Adeno-associated virus
  source 1..3123: mol_type = unassigned DNA
gaattcgccctttctacggctgcgtcaactggaccaatgaaaactttcccttcaacgattgcgtcgacaagatggtgatctggtgggaggagggaaagatgaccgccaaggtcgtggaatctgccaaagccattctgggtggaggcaaggttcgtgtggaccagaaatgcaagtcttcggcccagatcgacccgactccggtgattgtcacctctaacaccaacatgtgcgccgtgattgacggaaactcgaccaccttcgagcaccagcagccgttgcaagaccggatgttcaaatttgaacttacccgccgtttggatcatgactttgggaaggtcaccaagcaggaagtcaaagactttttccggtgggctcaagatcacgtgactgaggtggagcatgagttctacgtcaaaaagggtggagccaagaaaaggcccgcccccgatgatgtatatataaatgagcccaagcgggcgcgcgagtcagttgcgcagccatcgacgtcagacgcggaagcttcgataaactacgcggacaggtaccaaaacaaatgttctcgtcacgtgggcatgaatctgatgctgtttccctgtcgacaatgcgaaagaatgaatcagaattcaaatatctgcttcacacacgggcaaaaagactgtttggaatgctttcccgtgtcagaatctcaacccgtttctgtcgtcagaaaaacgtatcagaaactttgttacattcatcatatcatgggaaaagtaccagacgcctgcactgcctgcgacctggtaaatgtggacttggatgactgtatttctgagcaataaatgacttaaatcaggtatggctgctgacggttatcttccagattggctcgaggacactctctctgaaggaatcagacagtggtggaagctcaaacctggcccaccaccgccgaaacctaaccaacaacaccgggacgacagtaggggtcttgtgcttcctgggtacaagtacctcggacccttcaacggactcgacaaaggagagccggtcaacgaggcagacgccgcggccctcgagcacgacaaagcctacgaccaccagctcaagcaaggggacaacccgtacctcaaatacaaccacgcggacgctgaatttcaggagcgtcttcaagaagatacgtctttcgggggcaacctcgggcgagcagtcttccaggccaaaaagagggtactcgagcctcttggtctggttgaggaagctgttaagacggctcctggaaaaaagagacctatagagcagtctcctgcagaaccggactcttcctcgggcatcggcaaatcaggccagcagcccgctaagaaaagactcaattttggtcagactggcgacacagagtcagtcccaggccctcaaccaatcggagaaccccccgcagccccctctggtgtgggatctaatacaatggcttcaggcggtggggcaccaatggcagacaataacgaaggcgccgacggagtgggtaattcctcgggaaattggcattgcgattccacatggatgggcgacagagttatcaccaccagcacaagaacctgggccctccccacctacaataatcacctctacaagcaaatctccagcgaatcgggagccaccaacgacaaccactacttcggctacagcaccccctgggggtattttgactttaacagattccactgtcacttctcaccacgtgactggcagcgactcatcaacaacaactggggatttagacccaagaaactcaatttcaagctcttcaacatccaagtcaaggaggtcacgcagaatgatggaaccacgaccatcgccaataaccttaccagcgcggtgcaggtcttcacagactctgagtaccagctgccctacgtcctcggttcggctcaccagggctgccttccgccgttcccagcagacgtcttcatgattcctcagtacggctacttgactctgaacaatggcagccaagcggtaggacgttcttcattctactgtctagagtattttccctctcagatgctgaggacgggaaacaacttcaccttcagctacacttttgaagacgtgcctttccacagcagctacgcgcacagccagagtctggatcggctgatgaatcctctcattgaccagtacctgtattacctgagcaaaactcagggtacaagtggaacaacgcagcaatcgagactgcagttcagccaagctgggcctagctccatggctcagcaggccaaaaactggctaccgggacccagctaccgacagcagcgaatgtctaagacggctaatgacaacaacaacagtgaatttgcttggactgcagccaccaaatattacctgaatggaagaaattctctggtcaatcccgggcccccagtggccagtcacaaggacgatgaggaaaagtatttccccatgcacggaaatctcatctttggaaaacaaggcacaggaactaccaatgtggacattgaatcagtgcttattacagacgaagaagaaatcagaacaactaatcctgtggctacagaacaatacggacaggttgccaccaaccatcagagtcagaacaccacagcttcctatggaagtgtggacagccagggaatcttacctggaatggtgtggcaggaccgcgatgtctatcttcaaggtcccatttgggccaaaactcctcacacggacggacactttcatccttctccgctcatgggaggctttggactgaaacaccctcctccccagatcctgatcaaaaacacacctgtgccagcgaatcccgcgaccactttcactcctggaaagtttgcttcgttcattacccagtattccacctgacaggtcagcgtggaaatagagtgggagctgcagaaagaaaacagcaaacgctggaacccagaaattcagtacacctccaactacaacaagtcggtgaatgtggagtttaccgtggacgcaaacggtgtttattctgaaccccgccctattggcactcgttaccttacccggaacttgtaatttcctgttaatgaataagccgatttatgcgtttcagttgaactttggtctctgcgaagggcgaattcgtttaaacct

SEQ ID NO: 157 - protein, 735 aa, Adeno-associated virus
MAADGYLPDWLEDTLSEGIRQWWKLKPGPPPPKPNQQHRDDSRGLVLPGYKYLGPFNGLDKGEPVNEADAAALEHDKAYDHQLKQGDNPYLKYNHADAEFQERLQEDTSFGGNLGRAVFQAKKRVLEPLGLVEEAVKTAPGKKRPIEQSPAEPDSSSGIGKSGQQPAKKRLNFGQTGDTESVPGPQPIGEPPAAPSGVGSNTMASGGGAPMADNNEGADGVGNSSGNWHCDSTWMGDRVITTSTRTWALPTYNNHLYKQISSESGATNDNHYFGYSTPWGYFDFNRFHCHFSPRDWQRLINNNWGFRPKKLNFKLFNIQVKEVTQNDGTTTIANNLTSAVQVFTDSEYQLPYVLGSAHQGCLPPFPADVFMIPQYGYLTLNNGSQAVGRSSFYCLEYFPSQMLRTGNNFTFSYTFEDVPFHSSYAHSQSLDRLMNPLIDQYLYYLSKTQGTSGTTQQSRLQFSQAGPSSMAQQAKNWLPGPSYRQQRMSKTANDNNNSEFAWTAATKYYLNGRNSLVNPGPPVASHKDDEEKYFPMHGNLIFGKQGTGTTNVDIESVLITDEEEIRTTNPVATEQYGQVATNHQSQNTTASYGSVDSQGILPGMVWQDRDVYLQGPIWAKTPHTDGHFHPSPLMGGFGLKHPPPQILIKNTPVPANPATTFTPGKFASFITQYSTGQVSVEIEWELQKENSKRWNPEIQYTSNYNKSVNVEFTVDANGVYSEPRPIGTRYLTRNL

SEQ ID NO: 158 - DNA, 3123 bp, Adeno-associated virus
  source 1..3123: mol_type = unassigned DNA
gaattcgccctttctacggctgcgtcaactggaccaatgaaaactttcccttcaacgattgcgtcgacaagatggtgatctggtgggaggagggaaagatgaccgccaaggtcgtggaatctgccaaagccattctgggtggaagcaaggttcgtgtggaccagaaatgcaagtcttcggcccagatcgacccgactccggtgattgtcacctctaacaccaacatgtgcgccgtgattgacggaaactcgaccaccttcgagcaccagcagccgttgcaagaccggatgttcaaatttgaacttacccgccgtttggatcatgactttgggaaggtcaccaagcaggaagtcaaagactttttccggtgggctcaagatcacgtgactgaggtggagcatgagttctacgtcaaaaagggtggagccaagaaaaggcccgcccccgatgatgtatatataaatgagcccaagcgggcgcgcgagtcagttgcgcagccatcgacgtcagacgcggaagcttcgataaactacgcgggcaggtaccaaaacaaatgttctcgtcacgtgggcatgaatctgatgctgtttccctgtcgacaatgcgaaagaatgaatcagaattcaaatatctgcttcacacacgggcaaaaagactgtttggaatgctttcccgtgtcagaatctcaacccgtttctgtcgtcagaaaaacgtatcagaaactttgttacattcatcatatcatgggaaaagaaccagacgcctgcactgcctgcgacctggtaaatgtggacttggatgactgtatttctgagcaataaatgacttaaatcaggtatggctgctgacggttatcttccagattggctcgaggacactctctctgaaggaatcagacagtggtggaagctcaaacctggcccaccaccgccgaaacctaaccaacaacaccgggacgacagtaggggtcttgtgcttcctgggtacaagtacctcggacccttcaacggactcgacaaaggagagccggtcaacgaggcagacgccgcggccctcgagcacgacaaagcctacgaccaccagctcaagcaaggggacaacccgtacctcaaatacaaccacgcggacgctgaatttcaggagcgtcttcaagaagatacgtctttcgggggcaacctcgggcgagcagtcttccaggccaaaaagagggtactcgagcctcttggtctggttgaggaagctgttaagacggctcctggaaaaaagagacctatagagcagtctcctgcagaaccggactcttcctcgggcatcggcgaatcaggccagcagcccgctaagaaaagactcaattttggtcagactggcgacacagagtcagtcccagaccctcaaccaatcggagaaccccccgcagccccctctggtgtgggatctaatacaatggcttcaggcggtggggcaccaatggcagacgataacgaaggcgccgacggagtgggtaattcctcgggaaattggcattgcgattccacatggatgggcgacagagttatcaccaccagcacaagaacctgggccctccccacctacaataatcacctctacaagcaaatctccagcgaatcgggagccaccaacgacaaccactacttcggctacagcaccccctgggggtattttgactttaacagattccactgtcacttctcaccacgtgactggcagcgactcatcaacaacaactggggatttagacccaagaaactcaatttcaagctcttcaacatccaagtcaaggaggtcacgcagaatgatggaaccacgaccatcgccaataaccttaccagcacggtgcaggtcttcacagactctgagtaccagctgccctacgtcctcggttcggctcaccagggctgccttccgccgttcccagcagacgtcttcatgattcctcagtacggctacttgactctgaacaatggcagccaagcggtaggacgttcttcattctactgtctagagtattttccctctcagatgctgaggacgggaaacaacttcaccttcagctacacttttgaagacgtgcctttccacagcagctacgcgcacagccagagtctggatcggctgatgaatcctctcattgaccagtacctgtattacctgagcaaaactcagggtacaagtggaacaacgcagcaatcgagactgcagttcagccaagctgggcctagctccatggctcagcaggccaaaaactggctaccgggacccagctaccgacagcagcgaatgtctaagacggctaatgacaacaacaacagtgaatttgcttggactgcagccaccaaatattacctgaatggaagaaattctctggtcaatcccgggcccccaatggccagtcacaaggacgatgaggaaaagtatttccccatgcacggaaatctcatctttggaaaacaaggcacaggaactaccaatgtggacattgaatcagtgcttattacagacgaagaagaaatcagaacaactaatcctgtggctacagaacaatacggacaggttgccaccaaccatcagagtcaggacaccacagcttcctatggaagtgtggacagccagggaatcttacctggaatggtgtggcaggaccgcgatgtctatcttcaaggtcccatttgggccaaaactcctcacacggacggacactttcatccttctccgctcatgggaggctttggactgaaacaccctcctccccagatcctgatcaaaaacacacctgtgccagcgaatcccgcgaccactttcactcctggaaagtttgcttcgttcattacccagtattccaccggacaggtcagcgtggaaatagagtgggagctgcagaaagaaaacagcaaacgctggaacccagaaattcagtacacctccaactacaacaagtcggtgaatgtggagtttaccgtggacgcaaacggtgtttattctgaaccccgccctattggcactcgttaccttacccggaacttgtaatttcctgttaatgaataaaccgatttatgcgtttcagttgaactttggtctctgcgaagggcgaattcgcggccgcta

SEQ ID NO: 159 - protein, 735 aa, Adeno-associated virus
MAADGYLPDWLEDTLSEGIRQWWKLKPGPPPPKPNQQHRDDSRGLVLPGYKYLGPFNGLDKGEPVNEADAAALEHDKAYDHQLKQGDNPYLKYNHADAEFQERLQEDTSFGGNLGRAVFQAKKRVLEPLGLVEEAVKTAPGKKRPIEQSPAEPDSSSGIGESGQQPAKKRLNFGQTGDTESVPDPQPIGEPPAAPSGVGSNTMASGGGAPMADDNEGADGVGNSSGNWHCDSTWMGDRVITTSTRTWALPTYNNHLYKQISSESGATNDNHYFGYSTPWGYFDFNRFHCHFSPRDWQRLINNNWGFRPKKLNFKLFNIQVKEVTQNDGTTTIANNLTSTVQVFTDSEYQLPYVLGSAHQGCLPPFPADVFMIPQYGYLTLNNGSQAVGRSSFYCLEYFPSQMLRTGNNFTFSYTFEDVPFHSSYAHSQSLDRLMNPLIDQYLYYLSKTQGTSGTTQQSRLQFSQAGPSSMAQQAKNWLPGPSYRQQRMSKTANDNNNSEFAWTAATKYYLNGRNSLVNPGPPMASHKDDEEKYFPMHGNLIFGKQGTGTTNVDIESVLITDEEEIRTTNPVATEQYGQVATNHQSQDTTASYGSVDSQGILPGMVWQDRDVYLQGPIWAKTPHTDGHFHPSPLMGGFGLKHPPPQILIKNTPVPANPATTFTPGKFASFITQYSTGQVSVEIEWELQKENSKRWNPEIQYTSNYNKSVNVEFTVDANGVYSEPRPIGTRYLTRNL

SEQ ID NO: 160 - DNA, 3113 bp, Adeno-associated virus
  source 1..3113: mol_type = unassigned DNA
gaattcgccctttctacggctgcgtcaactggaccaatgaaaactttcccttcaacgattgcgtcgacaagatggtgatctggtgggaggagggaaagatgaccgccaaggtcgtggaatctgccaaagccattctgggtggaagcaaggttcgtgtggaccagaaatgcaagtcttcggcccagatcgacccgactccggtgattgtcacctctaacaccaacatgtgcgccgtgattgacggaaactcgaccaccttcgagcaccagcagccgttgcaagaccggatgttcaaatttgaacttacccgccgtttggatcatgactttgggaaggtcaccaagcaggaagtcaaagactttttccggtgggctcaagatcacgtgactgaggtggagcatgagttctacgtcaaaaagggtggagccaagaaaaggcccgcccccgatgatgtatatataaatgagcccaagcgggcgcgcgagtcagttgcgcagccatcgacgtcagacgcggaagcttcgataaactacgcggacaggtaccaaaacaaatgttctcgtcacgtgggcatgaatctgatgctgtttccctgtcgacaatgcgaaagaatgaatcagaattcaaatatctgcttcacacacgggcaaaaagactgtttggaatgctttcccgtgtcagaatctcaacccgttcctgtcgtcagaaaaacgtatcagaaactttgttacattcatcatatcatgggaaaagtaccagacgcctgcactgcctgcgacctggtaaatgtggacttggatgactgtatttctgagcaataaatgacttaaatcaggtatggctgctgacggttatcttccagattggctcgaggacactctctctgaaggaatcagacagtggtggaagctcaaacctggcccaccaccgccgaaacctaaccaacaacaccgggacgacagtaggggtcttgtgcttcctgggtacaagtacctcggacccttcaacggactcgacaaaggagagccggtcaacgaggcagacgccgcggccctcgagcacgacaaagcctacgaccaccagctcaagcaaggggacaacccgtacctcaaatacaaccacgcggacgctgaatttcaggagcgtcttcaagaagatacgtctttcgggggcaacctcgggcgagcagtcttccaggccaaaaagagggtactcgagcctcttggtctggttgaggaagctgttaagacggctcctggaaaaaagagacctatagagcagtctcctgcagaaccggactcttcctcgggcatcggcaaatcaggccagcagcccgctaagaaaagactcaattttggtcagactggcgacacagagtcagtcccagaccctcaaccaatcggagaaccccccgcagccccctctggtgtgggatctaatacaatggcttcaggcggtggggcaccaatggcagacaataacgaaggcgccgacggagtgggtaattcctcgggaaattggcattgcgattccacatggatgggcgacagagttatcaccaccagcacaagaacctgggccctccccacctacaataatcacctctacaagcaaatctccagcgaatcgggagccaccaacgacaaccactacttcggctacagcaccccctgggggtattttgactttaacagattccactgtcacttctcaccacgtgactggcagcgactcatcaataacaactggggatttagacccaagaaactcaatttcaagctcttcaacatccaagtcaaggaggtcacgcagaatgatggaaccacgaccatcgccaataaccttaccagcacggtgcaggtcttcacagactctgagtaccagctgccctacgtcctcggttcggctcaccagggctgccttccgccgttcccagcagacgtcttcatgattcctcagtacggctacttgactctgaacaatggcagccaagcggtaggacgttcttcattctactgtctagagtattttccctctcagatgctgaggacgggaaacaacttcaccttcagctacacttttgaagacgtgcctttccacagcagctacgcgcacagccagagtctggatcggctgatgaatcctctcattgaccagtacctgtattacctgagcaaaactcagggtacaagtggaacaacgcagcaatcgagactgcagttcaaccaagctgggcctagctccatggctcagcaggccaaaaactggctaccgggacccagctaccgacagcagcgaatgtctaagacggctaatgacaacaacaacagtgaatttgcttggactgcagccaccaaatattacccgaatggaagaaattctctggtcaatcccgggcccccaatggccagtcacaaggacgatgaggaaaagtatttccccatgcacggaaatctcatctttggaaaacaaggcacaggaactaccaatgtggacattgaatcagtgcttattacagacgaagaagaaatcagaacgactaatcctgtggctacagaacaatacggacaggttgccaccaaccgtcagagtcagaacaccacagcttcctatggaagtgtggacagccagggaatcttacctggaatggtgtggcaggaccgcgatgtctatcttcaaggtcccatttgggccaaaactcctcacacggacggacactttcatccttctccgctcatgggaggctttggactgaaacaccctcctccccagatcctgatcaaaaacacacctgtgccagcgaatcccgcgaccactttcactcctggaaagtttgcttcgttcattacccagtattccaccggacaggtcagcgtggaaatagagtgggagctgcagaaagaaaacagcaaacgctggaacccggaaattcagtacacctccaactacaacaagtcggtgaatgtggagtttaccgtggacgcaaacggtgtttattctgaaccccgccctattggcactcgttaccttacccggaacttgtaatttcctgttaatgaataaaccgatttatgcgtttcagttgaactttggtctctgcgaagggcgaattc

SEQ ID NO: 161 - protein, 735 aa, Adeno-associated virus
MAADGYLPDWLEDTLSEGIRQWWKLKPGPPPPKPNQQHRDDSRGLVLPGYKYLGPFNGLDKGEPVNEADAAALEHDKAYDHQLKQGDNPYLKYNHADAEFQERLQEDTSFGGNLGRAVFQAKKRVLEPLGLVEEAVKTAPGKKRPIEQSPAEPDSSSGIGKSGQQPAKKRLNFGQTGDTESVPDPQPIGEPPAAPSGVGSNTMASGGGAPMADNNEGADGVGNSSGNWHCDSTWMGDRVITTSTRTWALPTYNNHLYKQISSESGATNDNHYFGYSTPWGYFDFNRFHCHFSPRDWQRLINNNWGFRPKKLNFKLFNIQVKEVTQNDGTTTIANNLTSTVQVFTDSEYQLPYVLGSAHQGCLPPFPADVFMIPQYGYLTLNNGSQAVGRSSFYCLEYFPSQMLRTGNNFTFSYTFEDVPFHSSYAHSQSLDRLMNPLIDQYLYYLSKTQGTSGTTQQSRLQFNQAGPSSMAQQAKNWLPGPSYRQQRMSKTANDNNNSEFAWTAATKYYPNGRNSLVNPGPPMASHKDDEEKYFPMHGNLIFGKQGTGTTNVDIESVLITDEEEIRTTNPVATEQYGQVATNRQSQNTTASYGSVDSQGILPGMVWQDRDVYLQGPIWAKTPHTDGHFHPSPLMGGFGLKHPPPQILIKNTPVPANPATTFTPGKFASFITQYSTGQVSVEIEWELQKENSKRWNPEIQYTSNYNKSVNVEFTVDANGVYSEPRPIGTRYLTRNL

SEQ ID NO: 162 - DNA, 3122 bp, Adeno-associated virus
  source 1..3122: mol_type = unassigned DNA
agcggccgcgaattcgccctttctacggctgcgtcaactggaccaatgaaaactttcccttcaacgattgcgtcgacaagatggtgatctggtgggaggagggaaagatgaccgccaaggtcgtggaatctgccaaagccattctgggtggaagcaaggttcgtgtggaccagaaatgcaggtcttcggcccagatcgacccgactccggtgattgtcacctctaacaccaacatgtgcgccgtgattgacggaaactcgaccaccttcgagcaccagcagccgttgcaagaccggatgttcaaatttgaacttacccgccgtttggatcatgactttgggaaggtcaccaagcaggaagtcaaagactttttccggtgggctcaagatcacgtgactgaggtggagcatgagttctacgtcaaaaagggtggagccaagaaaaggcccgcccccgatgatgtatatataaatgagcccaagcgggcgcgcgagtcagttgcgcagccatcgacgtcagacgcggaagcttcgataaactacgcggacaggtaccaaaacaaatgttctcgtcacgtgggcatgaatctgatgctgtttccctgtcgacaatgcgaaagaatgaatcagaattcaaatatctgcttcacacacgggcaaaaagactgtttggaatgctttcccgtgtcagaatctcaacccgtttctgtcgtcagaaaaacgtatcagaaactttgttacattcatcatatcatgggaaaagtaccagacgcctgcactgcctgcgacctggtaaatgtggacttggatgactgtatttctgagcaataaatgacttaaatcaggtatggctgctgacggttatcttccagattggctcgaggacactctctctgaaggaatcagacagtggtggaagctcaaacctggcccaccaccgccgaaacctaaccaacaacaccgggacgacagtaggggtcttgtgcttcctgggtacaagtacctcggacccttcaacggactcgacaaaggagagccggtcaacgaggcagacgccgcggccctcgagcacgacaaagcctacgaccaccagctcaagcaaggggacaacccgtacctcaaatacaaccacgcggacgctgaatttcaggagcgtcttcaagaagatacgtctttcgggggcaacctcgggcgagcagtcttccaggccaaaaagagggtactcgagcctcttggtctggttgaggaagctgttaagacggctcctggaaaaaagagacctatagagcagtctcctgcagaaccggactcttcctcgggcatcggcaaatcaggccagcagcccgctaagaaaagactcaattttggtcagactggcgacacagagtcagtcccagaccctcaaccaatcggagaaccccccgcagccccctctggtgtgggatctaatacaatggcttcaggcggtggggcaccaatggcagacaataacgaaggcgccgacggagtgggtaattcctcgggaaattggcattgcgattccacatggatgggcgacagagttatcaccaccagcacaagaacctgggccctccccacctacaataatcgcctctacaagcaaatctccagcgaatcgggagccaccaacgacaaccactacttcggctacagcaccccctgggggtattttgactttaacagattccactgtcacttctcaccacgtgactggcagcgactcatcaacaacaactggggatttagacccaagaaactcaatttcaagctcttcaacatccaagtcaaggaggtcacgcagaatgatggaaccacgaccatcgccaataaccttaccagcacggtgcaggtcttcacagactctgagtaccagctgccctacgtcctcggttcggctcaccagggctgccttccgccgttcccagcagacgtcttcatgattcctcagtacggctacttgactctgaacaatggcagccaagcggtaggacgttcttcattctactgtctagagtattttccctctcagatgctgaggacgggaaacaacttcaccttcagctacacttttgaagacgtgcctttccacagcagctacgcgcacagccagagtctggatcggctgatgaatcctctcattgaccagtacctgtattacctgagcaaaactcagggtacaagtggaacaacgcagcaatcgagactgcagttcagccaagctgggcctagctccatggctcagcaggccaaaaactggctaccgggacccagctaccgacagcagcgaatgtctaagacggctaatgacaacaacaacagtgaatttgcttggactgcagccaccaaatattacctgaatggaagaaattctctggtcaatcccgggcccccaatggccagtcacaaggacgatgaggaaaagtatttccccatgcacggaaatctcatctttggaaaacaaggcacaggaactaccaatgtggacattgaatcagtgcttattacagacgaagaagaaatcagaacaactaatcctgtggctacagaacaatacggacaggttgccaccaaccatcagagtcagaacaccacagcttcctatggaagtgtggacagccagggaatcttacctggaatggtgtggcaggaccgcgatgtctatcttcaaggtcccatttgggccaaaactcctcacacggacggacactttcatccttctccgctcatgggaggctttggactgaaacaccctcctccccagatcctgatcaaaaacacacctgtgccagcgaatcccgcgaccactttcactcctggaaagtttgcttcgttcattacccagtattccaccggacaggtcagcgtggaaatagagtgggagctgcagaaagaaaacagcaaacgctggaacccagaaattcagtacacctccaactacaacaagtcggtgaatgtggagtttaccgtggacgcaaacggtgtttattctgaaccccgccctattggcactcgttaccttacccggaacttgtaatttcctgttaatgaataaaccgatttatgcgtttcagttgaactttggtctctgcgaagggcgaattc

SEQ ID NO: 163 - protein, 735 aa, Adeno-associated virus
MAADGYLPDWLEDTLSEGIRQWWKLKPGPPPPKPNQQHRDDSRGLVLPGYKYLGPFNGLDKGEPVNEADAAALEHDKAYDHQLKQGDNPYLKYNHADAEFQERLQEDTSFGGNLGRAVFQAKKRVLEPLGLVEEAVKTAPGKKRPIEQSPAEPDSSSGIGKSGQQPAKKRLNFGQTGDTESVPDPQPIGEPPAAPSGVGSNTMASGGGAPMADNNEGADGVGNSSGNWHCDSTWMGDRVITTSTRTWALPTYNNRLYKQISSESGATNDNHYFGYSTPWGYFDFNRFHCHFSPRDWQRLINNNWGFRPKKLNFKLFNIQVKEVTQNDGTTTIANNLTSTVQVFTDSEYQLPYVLGSAHQGCLPPFPADVFMIPQYGYLTLNNGSQAVGRSSFYCLEYFPSQMLRTGNNFTFSYTFEDVPFHSSYAHSQSLDRLMNPLIDQYLYYLSKTQGTSGTTQQSRLQFSQAGPSSMAQQAKNWLPGPSYRQQRMSKTANDNNNSEFAWTAATKYYLNGRNSLVNPGPPMASHKDDEEKYFPMHGNLIFGKQGTGTTNVDIESVLITDEEEIRTTNPVATEQYGQVATNHQSQNTTASYGSVDSQGILPGMVWQDRDVYLQGPIWAKTPHTDGHFHPSPLMGGFGLKHPPPQILIKNTPVPANPATTFTPGKFASFITQYSTGQVSVEIEWELQKENSKRWNPEIQYTSNYNKSVNVEFTVDANGVYSEPRPIGTRYLTRNL

SEQ ID NO: 164 - DNA, 3121 bp, Adeno-associated virus
  source 1..3121: mol_type = unassigned DNA
gaattcgcccttcgcagagaccaaagttcaactgaaacgaatcaaccggtttattgattaacaagcaattacagattacgggtgaggtaacgggtgccgatggggcgaggctcagaataagtgccatctgtgttaacagcaaagtccacatttgtagatttgtagtagttggaagtgtattgaatctctgggttccagcgtttgctgttttctttctgcagctcccattcaatttccacgctgacctgtccggtgctgtactgcgtgatgaacgacgccagcttagcttgactgaaggtagttggaggatccgcgggaacaggtgtattcttaatcaggatctgaggaggcgggtgtttcagtccaaagccccccatcagcggcgagggatgaaagtttccgtccgtgtgaggaatcttggcccagataggaccctgcaggtacacgtcccggttctgccagaccatgccaggtaaggctccttgactgttgacggcccctacaataggagcggcgttttgctgttgcaggttatcggccaccacgccgtactgttctgtggccactgggttggtggttttaatttcttcctcactggttagcataacgctgctatagtccacgttgccttttccagctccctgtttcccaaacattaagactccgctggacggaaaaaatcgctcttcgtcgtccttgtgggttgccatagcgacaccgggatttaccagagagtctctgccattcagatgatacttggtggcaccggtccaggcaaagttgctgttgttattttgcgacagtgtcgtggagacgcgttgctgccggtagcagggcccgggtagccagtttttggcctgagccgacatgttattaggcccggcctgagaaaatagcaactgctgagttcctgcggtacctcccgtggactgagtccgagacaggtagtacaggtactggtcgatgagggggttcatcagccggtccaggctttggctgtgcgcgtagctgctgtgaaaaggcacgtcctcaaactggtagctgaactcaaagttgttgcccgttctcagcatttgagaaggaaagtactccaggcagtagaaggaggaacggcccacggcctgactgccattgttcagagtcaggtacccgtactgaggaatcatgaagacgtccgccgggaacggaggcaggcagccctggcgcgcagagccgaggacgtacgggagctggtattccgagtccgtaaagacctgaatcgtgctggtaaggttattggcgatggtcttggtgccttcattctgcgtgacctccttgacctggatgttgaagagcttgaagttgagtctcttgggccggaatccccagttgttgttgatgagtcgctgccagtcacgtggtgagaagtggcagtggaatctgttaaagtcaaaatacccccagggggtgctgtagccgaagtaggtgttgtcgttggtgcttcctcccgaagtcccgttggagatttgcttgtagaggtggttgttgtaggtggggagggcccaggttcgggtgctggtggtgatgactctgtcgcccagccatgtggaatcgcaatgccaatttcctgaggaactacccactccgtcggcgccttcgttattgtctgccattggagcgccaccgcctgcagccattgtaccagatcccagaccagaggggcctgcggggggttctccgattggttgagggtcgggcactgactctgagtcgccagtctgcccaaagttgagtctctttttcgcgggctgctggcctttcttgccgatgcccgtagtggagtctggagaacgctggggtgatggctctaccggtctcttctttccaggagccgtcttagcgccttcctcaaccagaccgagaggttcgagaacccgcttcttggcctggaagactgctcgtccgaggttgcccccaaaagacgtatcttcttgcagacgctcctgaaactcggcgtcggcgtggttataccgcaggtacggattgtcacccgctttgagctgctggtcgtaggccttgtcgtgctcgagggccgctgcgtccgccgcgttgacgggctcccccttgtcgagtccgttgaagggtccgaggtacttgtagccaggaagcaccagaccccggccgtcgtcctgcttttgctggttggctttgggcttcggggctccaggtttcagcgcccaccactcgcgaatgccctcagagaggttgtcctcgagccaatctggaagataaccatcggcagccatacctgatctaaatcatttattgttcaaagatgcagtcatccaaatccacattgaccagatcgcaggcagtgcaagcgtctggcacctttcccatgatatgatgaatgtagcacagtttctgatacgcctttttgacgacagaaacgggttgagattctgacacgggaaagcactctaaacagtctttctgtccgtgagtgaagcagatatttgaattctgattcattctctcgcattgtctgcagggaaacagcatcagattcatgcccacgtgacgagaacatttgttttggtacctgtccgcgtagttgatcgaagcttccgcgtctgacgtcgatggctgcgcaactgactcgcgcacccgtttgggctcacttatatctgcgtcactgggggcgggtcttttcttggctccaccctttttgacgtagaattcatgctccacctcaaccacgtgatcctttgcccaccggaaaaagtctttgacttcctgcttggtgaccttcccaaagtcatgatccagacggcgggtgagttcaaatttgaacatccggtcttgcaacggctgctggtgttcgaaggtcgttgagttcccgtcaatcacggcgcacatgttggtgttggaggtgacgatcacgggagtcgggtctatctgggccgaggacttgcatttctggtccacgcgcaccttgcttcctccgagaatggctttggccgactccacgaccttggcggtcatcttcccctcctcccaccagatcaccatcttgtcgacacagtcgttgaagggaaagttctcattggtccagttgacgcagccgtagaagggcgaattc

SEQ ID NO: 165 - protein, 733 aa, Adeno-associated virus
MAADGYLPDWLEDNLSEGIREWWDLKPGAPKLKANQQKQDDGRGLVLPGYKYLGPFHGLDKGEPVNAADAAALEHDKAYDQQLKAGDNPYLRYNHADAEFQERLQEDTSFGGNLGRAVFQAKKRVLEPLGLVEEGAKTAPGKKRPLESPQEPDSSSGIGKKGKQPAKKRLNFEEDTGAGDGPPEGSDTSAMSSDIEMRAAPGGNAVDAGQGSDGVGNASGDWHCDSTWSEGKVTTTSTRTWVLPTYNNHLYLRLGTTSNSNTYNGFSTPWGYFDFNRFHCHFSPRDWQRLINNNWGLRPKAMRVKIFNIQVKEVTTSNGETTVANNLTSTVQIFADSSYELPYVMDAGQEGSLPPFPNDVFMVPQYGYCGIVTGENQNQTDRNAFYCLEYFPSQMLRTGNNFEMAYNFEKVPFHSMYAHSQSLDRLMNPLLDQYLWHLQSTTSGETLNQGNAATTFGKIRSGDFAFYRKNWLPGPCVKQQRFSKTASQNYKIPASGGNALLKYDTHYTLNNRWSNIAPGPPMATAGPSDGDFSNAQLIFPGPSVTGNTTTSANNLLFTSEGEIAATNPRDTDMFGQIADNNQNATTAPITGNVTAMGVLPGMVWQNRDIYYQGPIWAKIPHADGHFHPSPLIGGFGLKHPPPQIFIKNTPVPANPATTFTAARVDSFITQYSTGQVAVQIEWEIEKERSKRRNPEVQFTSNYGNQSSMLWAPDTTGKYTEPRVIGSRYLTNHL

SEQ ID NO: 166 - protein, 735 aa, Adeno-associated virus
MAADGYLPDWLEDTLSEGIRQWWKLKPGPPPPKPNQQHRDDSRGLVLPGYKYLGPFNGLDKGEPVNEADAAALEHDKAYDHQLKQGDNPYLKYNHADAEFQERLQEDTSFGGNLGRAVFQAKKRVLEPLGLVEEAVKTAPGKKRPIEQSPAEPDSSSGIGKSGQQPAKKRLNFGQTGDTESVPDPQPIGEPPAAPSGVGSNTMASGGGAPMADNNEGADGVGNSSGNWHCDSTWMGDRVITTSTRTWALPTYNNHLYKQISSESGATNDNHYFGYSTPWGYFDFNRFHCHFSPRDWQRLINNNWGFRPKKLNFKLFNIQVKEVTQNDGTTTIANNLTSTVQVFTDSEYQLPYVLGSAHQGCLPPFPADVFMIPQYGYLTLNNGSQAVGRSSFYCLEYFPSQMLRTGNNFTFSYTFEDVPFHSSYAHSQSLDRLMNPLIDQYLYYLSKTQGTSGTTQQSRLQFSQAGPSSMAQQAKNWLPGPSYRQQRMSKTANDNNNSEFAWTAATKYYLNGRNSLVNPGPPMASHKDDEEKYFPMHGNLIFGKQGTGTTNVDIESVLITDEEEIRTTNPVATEQYGQVATNHQSQNTTASYGSVDSQGILPGMVWQDRDVYLQGPIWAKIPHTDGHFHPSPLMGGFGLKHPPPQILIKNTPVPANPATTFTPGKFASFITQYSTGQVSVEIEWELQKENSKRWNPEIQYTSNYNKSVNVEFTVDANGVYSEPRPIGTRYLTRNL

SEQ ID NO: 167 - DNA, 3127 bp, Adeno-associated virus
  source 1..3127: mol_type = unassigned DNA
gcggccgcgaattcgcccttcgcagagaccaaagttcaactgaaacgaatcaaccggtttattgattaacatgcaattacagattacgggtgaggtaacgagtgccaatagggcgaggctcagagtaaacaccctggctgtcaacggcaaagtccacaccagtctgcttttcaaagttggaggtgtactgaatctccgggtcccagcgcttgctgttttccttctgcagctcccactcgatttccacgctgacttgtccggtgctgtactgtgtgatgaacgaagcaaacttggcaggagtaaacacctccggaggattagcgggaacgggagtgttcttgatcaggatctgaggaggcggatgtttaagtccaaagccgcccatcaaaggagacgggtgaaagttgccatccgtgtgaggaatcttggcccagatgggaccctgcaggtacacgtcccggttctgccagaccatgccaggtaaggctccctggttgttgacaacttgtgtctgggctgcagtattagccgcttgtaagttgctgctgactatcccgtattcttccgtggctacaggattagtaggacgaatttcttcttcatttgtcattaacacattttccaatgtagttttgttagttgctccagtttttccaaaaatcaggactccgctggatgggaaaaagcggtcctcgtcgtccttgtgagttgccatggcgacgccgggattaaccaacgagtttctgccgttcaggtgatatttggtggcaccagtccaagcaaagttgctgttgttgttttgatccagcgttttggagaccctttgttgccggaagcagggtccaggtaaccaattcttggcttgttcggccatagttgaaggcccgccctggtaaaactgcagttcccgattgccagctgtgcctcctgggtcactctgtgttctggccaggtagtacaagtactggtcgatgaggggattcatcagccggtccaggctctggctgtgtgcgtagctgctgtggaaaggcacgtcctcgaagctgtagctgaactcaaagttgttgcccgttctcagcatctgagaggggaagtactccaggcagtagaaggaggaacgtcccacagactgactgccattgttgagagtcaggtagccgtactgaggaatcatgaagacgtccgccgggaacggaggcaggcagccctggtgcgcagagccgaggacgtacggcagctggtattccgagtccgagaatacctgaatcgtgctggtaaggttattagcgatggtcgtaacgccgtcattcgtcgtgacctccttgacctggatgttgaagagcttgaaccgcagcttcttgggccggaatccccagttgttgttgatgagtcgctgccagtcacgtggtgagaagtggcagtggaatctgttaaagtcaaaatacccccagggggtgctgtagccgaagtaggtgttgtcgttggtactacctgcagtttcactggagatttgctcgtagaggtggttgttgtaggtgggcagggcccaggttcgggtgctggtggtaatgactctgtcgcccagccatgtggaatcgcaatgccaatttcctgaggcattacccactccgtcggcaccttcgttattgtctgccattggtgcgccaccgcctgcagccactgtaccagatcccacactagagggcgctgctggaggttctccgagaggttgagggtcggggactgactctgagtcgccagtctgaccgaaattgagtctctttctggcgggctgctggcccttcttgccgatgcccgtggaggagtcgggggaacgctgaggtgacggctctaccggtctcttctttgcaggagccgtcttagcgccttcctcaaccagaccgagaggttcgagaacccgcttcttggcctggaagactgctcgcccgaggttgcccccaaatgacgtatcttcttgcagacgctcctgaaactcggcgtcggcgtggttataccgcaggtacgggttgtcacccgcattgagctgctggtcgtaggccttgtcgtgctcgagggccgctgcgtccgccgcgttgacgggctcccccttgtcgagtccgttgaagggtccgaggtacttgtagccaggaagcaccagaccccggccgttgtcctgcttttgctggttggctttgggtttcggggctccaggtttcaggtcccaccactcgcgaatgccctcagagaggttgtcctcgagccaatctggaagataaccatcggcagccatacctgatttaaatcatttattgttcaaagatgcagtcatccaaatccacattgaccagatcgcaggcagtgcaagcgtctggcacctttcccatgatatgatgaatgtagcacagtttctgatacgcctttttgacgacagaaacgggtttagattctgacacgggaaagcactctaaacagtctttctgtccgtgagtgaagcagatatttgaattctgattcattctctcgcattgtctgcagggaaacagcatcagattcatgcccacgtgacgagaacatttgttttggtacctgtctgcgtagttgatcgaagcttccgcgtctgacgtcgatggctgcgcaactgactcgcgcacccgtttgggctcacttatatctgcgtcactgggggcgggtcttttcttggctccaccctttttgacgtagaattcatgctccacctcaaccacgtaatcctttgcccaccggaaaaagtctttgacttcctgcttggtgaccttcccaaagtcatgatccagacggcgggtgagttcaaatttgaacatccggtcttgcaacggctgctggtgttcgaaggtcgttgagttcccgtcgatcacggcgcacatgttggtgttggagatgacgatcgcgggagtcgggtctatctgggccgaggacttgcatttctggtccacgcgcaccttgcttcctccgagaatggctttggccgactccacgaccttggcggtcatcttcccctcctcccaccagatcaccatcttgtcgacacagtcgttgaagggaaagttctcattggtccagttgacgcagccgtagaaagggcgaattc

SEQ ID NO: 168 - protein, 728 aa, Adeno-associated virus
MAADGYLPDWLEDNLSEGIREWWDLKPGAPKPKANQQKQDDGRGLVLPGYKYLRPFNGLDKGEPVNEADAAALEHDKAYDKQLEQGDNPYLKYNHADAEFQERLQEDTSFGGNLGRAVFQAKKRVLEPLGLVEEVAKTAPGKKRPIESPDSSTGIGKKGQQPAKKKLNFGQTGDSESVPDPQPLGEPPAAPSGLGSGTMAAGGGAPMADNNEGADGVGNASGNWHCDSTWLGDRVITTSTRTWALPTYNNHLYKQISSQSGATNDNHFFSYSTPWGYFDFNRFHCHFSPRDWQRLINNNWGFRPRKLRFKLFNIQVKEVTTNDGVTTIANNLTSTIQVFSDSEYQLPYVLGSAHQGCLPPFPADVFMIPQYGYLTLNNGSQSVGRSSFYCLEYFPSQMLRTGNNFEFSYTFEEVPFHSSYVHSQSLDRLMNPLIDQYLYYLARTQSTTGSTRELQFHQAGPNTMAEQSKNWLPGPCYRQQRLSKNIDSNNNSNFAWTGATKYHLNGRNSLTNPGVAMATNKDDEDQFFPINGVLVFGKTGAANKTTLENVLMTSEEEIKTTNPVATEEYGVVSSNLQSSTAGPQTQTVNSQGALPGMVWQNRDVCLQGPIWAKIPHTDGNFHPSPLMGGFGLKHPPPQILIKNTPVPANPPEVFTPAKFASFITQYSTGQVSVEIEWELQKENSKRWNPEIQYTSNYAKSNNVEFAVNNEGVYTEPRPIGTRYLTRNL

SEQ ID NO: 169 - DNA, 3106 bp, Adeno-associated virus
  source 1..3106: mol_type = unassigned DNA
gcggccgcgaattcgcccttcgcagagaccaaagttcaactgaaacgaatcaaccggtttattgattaacaagtaattacaggttacgggtgaggtaacgggtgccaatggggcgaggctcagtataaaccccttcgttgttgacagcaaattccacattattagacttggcataatttgaggtgtactgaatctctggattccagcgtttgctgttttctttctgcagttcccactcgatctccacgctgacctggccggtgctgtactgcgtgataaatgaggcaaacttggcaggagtaaacacctctggaggattagcaggtaccggggtgtttttgatgagaatttgaggaggcgggtgtttgagtccaaatccgcccatcaggggagacgggtgaaagttgccgtccgtgtgaggaattttggcccagatgggaccctgcaggcacacgtcccggttctgccagaccatgccgggcagagccccctggctgttgacagtctgtgtctggggtccggccgtagacgattgcaggttgctggagaccacaccgtattcttctgtagccacgggattggtggttttgatctcctcctcgctggtcattagcacgttttccagcgttgtcttgttggcagcccccgttttgccaaaaaccagcactccgttgatgggaaagaactggtcctcgtcgtccttgttggtggccatggctacgcccgggttggttaatgaatttctaccattcagatggtatttagtggccccggtccaggcaaagttactgttgttgttgctgtctatgttttttgacagtctctgctgccgataacagggtccgggcagccagttctttgattgctcggccatggtgttgggcccagcctgatggaactgcagctcccttgtggaccccgtagtgctctgggtccgggccaggtagtacaggtactggtcgatgaggggattcatcagccggtctaggctctggctgtgcacatagctgctgtggaaaggcacttcctcaaaggtgtagctgaattcaaagttattgcccgttctcagcatctgagaaggaaagtactccaggcagtagaaggaggaacgtcccacagactgactgccgttgtttagagtcagatatccgtactgaggaatcatgaacacgtccgcagggaacggagggaggcagccctggtgcgcagagccgaggacgtacggcagttggtactccgagtccgagaagacctgaatcgtgctggtaaggttattagcgatggtcgtaacgccgtcgttcgtcgtgacctccttgacctggatgttgaacaacttgaaccgcagctttctgggccggaatccccagttgttgttgatgagtcgctgccagtcacgtggtgagaagtggcagtggaatctgttgaagtcaaaatagccccagggggtgctgtagctgaagaagtggttgtcgttggtagccccgctctgacttgatatctgcttgtagaggtggttgttgtaggtgggcagggcccaggtgcgggtgctggtggtgatgactctgtcgcccagccatgtggaatcgcaatgccaatttccggaggcattacccactccgtcggcgccttcgttattgtctgccattggtgcgccaccgcctgcagccattgtaccagatcccagacctgagggcgcggcgggaggttctccgagaggttgggggtcgggcactgactctgagtcgccagtctgcccaaagttgagcttctttttagcgggctgctggcctttcttgccgatgcccgtggaggagtcgggggattctatgggtctcttctttccaggagccgtcttagcgacttcctcaaccagaccgagaggttcgagaacccgcttcttggcctggaagactgctcgcccgaggttgcccccaaaagacgtatcttcttgaagacgctcctgaaactcggcgtcggcgtggttgtacttgaggtacgggttgtccccctgctcgagctgcttgtcgtaggccttgtcgtgctcgagggccgcggcgtctgcctcgttgaccggctctcccttgtcgagtccgttgaagggtctgaggtacttgtagccaggaagcaccagaccccggccgtcgtcctgcttttgctggttggctttgggtttcggggctccaggtttcaagtcccaccactcgcgaatgccctcagagaggttgtcctcgagccaatctggaagataaccatcggcagccatacctggtttaagtcatttattgctcagaaacacagtcatccaggtccacgttgaccagatcgcaggccgagcaagcaatctcgggagcccgccccagcagatgatgaatggcacagagtttccgatacgtcctctttctgacgaccggttgagattctgacacgccggggaaacattctgaacagtctctggtcccgtgcgtgaagcaaatgttgaaattctgattcactctctcgcatgtcttgcagggaaacagcatctgaagcatgcccgcgtgacgagaacatttgttttggtacctgtcggcaaagtccaccggagctccttccgcgtctgacgtcgatggattcgcgactgaggggcaggcccgcttgggctcgcttttatccgcgtcatcgggggcgggtctcttgttggccccaccctttctgacgtagaacccatgcgccacctcggtcacgtgatcctgcgcccagcggaagaaccttttgacttcctgctttgtcaccttgccaaagttatgctccagacggcgggtgggttcaaatttgaacatccggtcctgcaacggctgctggtgctcgaaggtggcgctgttcccgtcaatcacggcgcacatgttggtgttggaggtgacggtcacgggggtggggtcgatctgggcggacgacttgcacttttggtccacgcgcaccttgctgccgccgagaatggccttggcggactccacgaccttggccgtcatcttgccctcctcccaccagatcaccatcttgtcggcgcaatcgttgaagggaaagttctcattggtccagttgacgcagccgtagaaagggcgaattc

SEQ ID NO: 170 - protein, 728 aa, Adeno-associated virus
MAADGYLPDWLEDNLSEGIREWWDLKPGAPKPKANQQKQDDGRGLVLPGYKYLGPFNGLDKGEPVNEADAAALEHDKAYDKQLEQGDNPYLKYNHADAEFQERLQEDTSFGGNLGRAVFQAKKRVLEPLGLVEEGAKTASGKKRPIESPDSSTGIGKKGQQPAKKKLNFGQTGDSESVPDPQPLGEPPAAPSGLGSGTMAAGGGAPMADNNEGADGVGNASGNWHCDSTWLGDRVITTSTRTWALPTYNNHLYKQISSQSGATNDNHFFGYSTPWGYFDFNRFHCHFSPRDWQRLINNNWGFRPRKLRFKLFNIQVKEVTTNDGVTTIANNLTSTIQVFSDSEYQLPYVLGSAHQGCLPPFPADVFMIPQYGYLTLNNGSQSVGRSSFCCLEYFPSQMLRTGNNFEFSYTFEEVPFHSSYAHSQSLDRLMNPLIDQYLYYLARTQSTTGSTRELQFHQAGPNTVAEQSKNWLPGPCYRQQRLSKNIDSNNNSNFAWTGATKYHLNGRNSLTNPGVAMATNKDDEDQFLPINGVLVFGKTGAANKTTLENVLMTSEEEIKTTNPVATEEYGVVSSNLQSSTAGPRTQTVNSQGALPGMVWQNRDVYLQGPIWAEIPHTDGNFHPSPLMGGFGLKHPPPQILIKNTPVPANPPEVFTPAKFASFITQYSTGQVSVEIEWELQKENSKRWNPEIQYTSNYAKSNNVEFAVNNEGVYTEPRPIGTRYLTRNL

SEQ ID NO: 171 - DNA, 3102 bp, Adeno-associated virus
  source 1..3102: mol_type = unassigned DNA
gcggccgcgaattcgcccttcgcagagaccaaagttcaactgaaacgaatcaaccggtttattgattaacaagtaattacaggttacgggtgaggtaacgggtgccaatggggcgaggctcagtataaaccccttcgttgttgacagcaaattccacattattagacttggcataatttgaggtgtactgaatctctggattccagcgtttgctgttttctttctgcagttcccactcgatctccacgctgacctggccggtgctgtactgcgtgataaatgaggcaaacttggcaggagtaaacacctctggaggattagcaggtaccggggtgtttttgatgagaatttgaggaggcgggtgtttgagtccaaatccgcccatcaggggagacgggtgaaagttgccgtccgtgtgaggaatttcggcccagatgggaccctgcaggtacacgtcccggttctgccagaccatgccgggcagagccccctggctgttgacagtctgtgtccggggtccggccgtagacgattgcaggttgctggagaccacaccgtattcttctgtagccacgggattggtggttttgatctcctcctcgctggtcattagcacgttttccagcgttgtcttgttggcagcccccgttttgccaaaaaccagcactccgttgatgggaaggaactggtcctcgtcgtccttgttggtggccatggctacgcccgggttggttaatgaatttctaccattcagatggtatttagtggccccggtccaggcaaagttactgttgttgttgctgtctatgttttttgacagtctctgctgccgataacagggtccgggcagccagttctttgattgctcggccacggtgttgggcccagcctgatggaactgcagctcccttgtggaccccgtagtgctctgggtccgggccaggtagtacaggtactggtcgatgaggggattcatcagccggtccaggctctggctgtgcgcatagctgctgtggaaaggcacttcctcaaaggtgtagctgaattcaaagttattgcccgttctcagcatctgagaaggaaagtactccaggcagcagaaggaggaacgtcccacagactgactgccgttgtttagagtcagatatccgtactgaggaatcatgaacacgtccgcagggaacggagggaggcagccctggtgcgcagagccgaggacgtacggcagttggtactccgagtccgagaagacctgaatcgtgctggtaaggttattagcgatggtcgtaacgccgtcgttcgtcgtgacctccttgacctggatgttgaacaacttgaaccgcagctttctgggccggaatccccagttgttgttgatgagtcgctgccagtcacgtggtgagaagtggcagtggaatctgttgaagtcaaaatagccccagggggtgctgtagccgaagaagtggttgtcgttggtagccccgctctgacttgatatctgcttgtagaggtggttgttgtaggtgggcagggcccaggtgcgggtgctggtggtgatgactctgtcgcccagccatgtggaatcgcaatgccaatttccggaggcattacccactccgtcggcgccttcgttattgtctgccattggtgcgccaccgcctgcagccattgtaccagatcccagacctgagggcgcggcgggaggttctccgagaggttgggggtcgggcactgactctgagtcgccagtctgcccaaagttgagcttctttttagcgggctgctggcctttcttgccgatgcccgtggaggagtcgggggattctatgggtctcttctttccggaagccgtcttagcgccttcctcaaccagaccgagaggttcgagaacccgcttcttggcctggaagactgctcgcccgaggttgcccccaaaagacgtatcttcttgaagacgctcctgaaactcggcgtcggcgtggttgtacttgaggtacgggttgtccccctgctcgagctgcttgtcgtaggccttgtcgtgctcgagggccgcggcgtctgcctcgttgaccggctctcccttgtcgagtccgttgaagggtccgaggtacttgtagccaggaagcaccagaccccggccgtcgtcctgcttttgctggttggctttgggtttcggggctccaggtttcaagtcccaccactcgcgaatgccctcagagaggttgtcctcgagccaatctggaagataaccatcggcagccatacctggtttaagtcatttattgctcagaaacacagtcatccaggtccacgttgaccagatcgcaggccgagcaagcaatctcgggagcccgccccagcagatgatgaatggcacagagtttccgatacgtcctctttctgacgaccggttgagattctgacacgccggggaaacattctgaacagtctctggtcccgtgcgtgaagcaaatgttgaaattctgattcattctctcgcatgtcttgcagggaaacagcatctgaagcatgcccgcgtgacgagaacatttgttttggtacctgtcggcaaagtccaccggagctccttccgcgtctgacgtcgatggatccgcgactgaggggcaagcccgcttgggctcgcttttatccgcgtcatcgggggcgggtctcttgttggctccaccctttctgacgtagaactcatgcgccacctcggtcacgtgatcctgcgcccagcggaagaactctttgacttcctgctttgtcaccttgccaaagtcatgctccagacggcgggtgagttcaaatttgaacatccggtcttgtaacggctgctggtgctcgaaggtggtgctgttcccgtcaatcacggcgcacatgttggtgttggaagtgacgatcacgggggtgggatcgatctgggcggacgacttgcacttttggtccacgcgcaccttgctgccgccgagaatggccttggcggactccacgaccttggccgtcatcttgccctcctcccaccagatcaccatcttgtcgacgcaatcgttgaagggaaagttctcattggtccagttgacgcagccgaagggcgaattc

SEQ ID NO: 172 - protein, 728 aa, Adeno-associated virus
MAADGYLPDWLEDNLSEGIREWWDLKPGAPKPKANQQKQDDGRGLVLPGYRYLGPFNGLDKGEPVNEADAAALEHDKAYDKQLEQGDNPYLKYNHADAEFQERLQEDTSFGGNLGRAVFQAKKRVLEPLGLVEEGAKTAPGKKRPIESPDSSTGIGKNGQPPAKKKLNFGQTGDSESVPDPQPLGEPPAAPSGLGSGTMAAGGGAPMADNNEGADGVGNASGNWHCDSTWLGDRVITTSTRTWALPTYNNHLYKQISSQSGATNDNHFFGYSTPWGYFDFNRFHCHFSPRDWQRLINNNWGFRPRKLRFKLFNIQVKEVTTNDGVTTIANNLTSTIQVFSDSEYQLPYVLGSAHQGCLPPFPADVFMIPQYGYLTLNNGSQSVGRSSFYCLEYFPSQMLRTGNNFEFSYTFEEVPFHSSYAHSQSLDRLMNPLIDQYLYYLARTQSTTGSTRELQFHQAGPNTMAEQSKNWLPGPCYRQQRLSKNIDSNNNSNFAWTGATKYHLNGRNSLTNPGVAMATNKDDEDQFFPINGVLVFGKTGAANKTTLENVLMTSEEEIKTTNPVATEEYGVVSSNLQSSTAGPQTQTVNSQGALPGMVWQNRDVYLQGPIWAKIPHTDGNFHPSPLMGGFGLKHPPPQILIKNTPVPANPPEVFTPAKFASFITQYSTGQVSVEIEWELQKENSKRWNPEIQYTSNYAKSNNVEFAVNNEGVYTEPRPIGTRYLTRNL

SEQ ID NO: 173 - protein, 728 aa, Adeno-associated virus
MAADGYLPDWLEGNLSEGIREWWDLKPGAPKPKANQQKQDDGRGLVLPGYRYLGPFNGLDKGEPVNEADAAALEHDKAYDKQLEQGDNPYLKYNHADAEFQERLQEDTSFGGNLGRAVFQAKKRVLEPLGLVEEGAKTAPGKKRPIESPDSSTGIGKNGQPPAKKKLNFGQTGDSESVPDPQPLGEPPAAPSGLGSGTMAAGGGAPMADNNEGADGVGNASGNWHCDSTWLGDRVITTSTRTWALPTYNNHLYKQISSQSGATNDNHFFGYSTPWGYFDFNRFHCHFSPRDWQRLINNNWGFRPRKLRFKLFNIQVKEVTTNDGVTTIANNLTSTIQVFSDSEYQLPYVLGSAHQGCLPPFPADVFMIPQYGYLTLNNGSQSVGRSSFYCLEYFPSQMLRTGDNFEFSYTFEEVPFHSSYAHSQSLDRLMNPLIDQYLYYLARTQSTTGSTRELQFHQAGPNTMAEQSKNWLPGPCYRQQRLSKNIDSNNNSNFAWTGATKYHLNGRNSLTNPGVAMATNKDDEDQFFPINGVLVFGKTGAANKTTLENVLMTSEEEIKTTNPVATEEYGVVSSNLQSSTAGPQTQTVNSQGALPGMVWQNRDVYLQGPIWAKIPHTDGNFHPSPLMGGFGLKHPPPQILIKNTPVPANPPEVFTPAKFASFITQYSTGQVSVEIEWELQKENSKRWNPEIQYTSNYAKSNNVEFAVNNEGVYTEPRPIGTRYLTRNL

SEQ ID NO: 174 - DNA, 3106 bp, Adeno-associated virus
  source 1..3106: mol_type = unassigned DNA
gcggccgcgaattcgcccttcgcagagaccaaagttcaactgaaacgaatcagccggtttattgattaacaagtaattacaggttacgggtgaggtaacgggtgccaatggggcgaggctcagtataaaccccttcgttgttgacagcaaattccacattattagacttggcataatttgaggtgtactgaatctctggattccagcgtttgctgttttctttctgcagttcccactcgatctccacgctgacctggccggtgctgtactgcgtgataaatgaggcaaacttggcaggagtaaacacctctggaggattagcaggtaccggggtgtttttgatgagaatttgaggaggcgggtgtttgagtccaaatccgcccatcaggggagacgggtgaaagttgccgtccgtgtgaggaattttggcccagatgggaccctgcaggtacacgtcccggttctgccagaccatgccgggcagagccccctggctgttgacagtctgtgtctggggtccggccgtagacgattgcaggttgctggagaccacaccgtattcttctgtagccacgggattggtggttttgatctcctcctcgctggtcattagcacgttttccagcgttgtcttgttggcagcccccgttttgccaaaaaccagcactccgttgatgggaaagaactggtcctcgtcgtccttgttggtggccatggctacgcccgggttggttaatgaatttctaccattcagatggtatttagtggccccggtccaggcaaagttactgttgttgttgctgtctatgttttttgacagtctctgctgccgataacagggtccgggcagccagttctttgattgctcggccatggtgttgggcccagcctgatggaactgcagctcccttgtggaccccgtagtgctctgggtccgggccaggtagtacaggtactggtcgatgaggggattcatcagccggtccaggctctggctgtgcgcatagctgctgtggaaaggcacttcctcaaaggtgtagctgaattcaaagttatcgcccgttctcagcatctgagaaggaaagtactccaggcagtagaaggaggaacgtcccacagactgactgccgttgtttagagtcagatatccgtactgaggaatcatgaacacgtccgcagggaacggagggaggcagccctggtgcgcagagccgaggacgtacggcagttggtactccgagtccgagaagacctgaatcgtgctggtaaggttattagcgatggtcgtaacgccgtcgttcgtcgtgacctccttgacctggatgttgaacaacttgaaccgcagctttctgggccggaatccccagttgttgttgatgagtcgctgccagtcacgtggtgagaagtggcagtggaatctgttgaagtcaaaatagccccagggggtgctgtagccgaagaagtggttgtcgttggtagccccgctctgacttgatatctgcttgtagaggtggttgttgtaggtgggcagggcccaggtgcgggtgctggtggtgatgactctgtcgcccagccatgtggaatcgcaatgccaatttccggaggcattacccactccgtcggcgccttcgttattgtctgccattggtgcgccaccgcctgcagccattgtaccagatcccagacctgagggcgcggcgggaggttctccgagaggttgggggtcgggcactgactctgagtcgccagtctgcccaaagttgagcttctttttagcgggcggctggccgttcttgccgatgcccgtggaggagtcgggggattctatgggtctcttctttccaggagccgtcttagcgccttcctcaaccagaccgagaggttcgagaacccgcttcttggcctggaagactgctcgcccgaggttgcccccaaaagacgtatcttcttgaagacgctcctgaaactcggcgtcggcgtggttgtacttgaggtacgggttgtccccctgctcgagctgcttgtcgtaggccttgtcgtgctcgagggccgcggcgtctgcctcgttgaccggctctcccttgtcgagtccgttgaagggtccgaggtacctgtagccaggaagcaccagaccccggccgtcgtcctgcttttgctggttggctttgggtttcggggctccaggtttcaagtcccaccactcgcgaatgccctcagagaggttgccctcgagccaatctggaagataaccatcggcagccatacctggtttaagtcatttattgctcagaaacacagtcatccaggtccacgttggccagatcgcaggccgagcaagcaatctcgggagcccgccccagcagatgatgaatggcacagagtttccgatacgtcctctttctgacgaccggttgagattctgacacgccggggaaacattctgaacagtctctggtcccgtgcgtgaagcaaatgttgaaattctgattcattctctcgcatgtcttgcaggggaacagcatctgaagcatgcccgcgtgacgagaacatttgttttggtacctgtcggcaaagtccaccggagctccttccgcgtctgacgtcgatggatccgcgactgaggggcaggcccgcttgggctcgcttttatccgcgtcatcgggggcgggtctcttgttggctccaccctttctgacgtagaactcatacgccacctcggtcacgtgatcctgcgcccagcggaagaactctttgacttcctgctttgtcaccttgccaaagtcatgctccagacggcgggtgagttcaaatttgaacatccggtcttgtaacggctgctggtgctcgaaggtggtgctgttcccgtcaatcacggcgcacatgttggtgttggaagtgacgatcacgggggtgggatcgatctgggcggacgacttgcacttttggtccacgcgcaccttgctgccgccgagaatggccttggcggactccacgaccttggccgtcatcctgccctcctcccaccagatcaccatcttgtcgacgcaatcgttgaagggaaagttctcattggtccagttgacgcagccgtagaaagggcgaattc

SEQ ID NO: 175 - protein, 728 aa, Adeno-associated virus
MAADGYLPDWLEDNLSEGIREWWDLKPGAPKPKANQQKQDDGRGLVLPGYKYLGPFNGLDKGEPVNEADAAALEHDKAYDKQLEQGDNPYLKYNHADAEFQERLQEDTSFGGNLGRAVFQAKKRVLEPLGLVEEGAKTAPGKKRPIESPDSSTGIGKKGQQPAKKKLNFGQTGDSESVPDPQPLGEPPAAPSGLGSGTMAAGGGAPMADNNEGADGVGNASGNWHCDSTWLGDRVITTSTRTWALPTYNNHLYKQISSQSGATNDNHFFGYSTPWGYFDFNRFHCHFSPRDWQRLINNNWGFRPRKLRFKLFNIQVKEVTTNDGVTTIANNLTSTIQVFSDSEYQLPYVLGSAHQGCLPPFPADVFMIPQYGYLTLNNGSQSMGRSSFYCLEYFPSQMLRTGNNFEFSYTFEEVPFHSSYAHSQSLDRLMNPLIDQYLYYLARTQSTTGSTRELQFHQAGPNTMAEQSKNWLPGPCYRQQRLSKNIDSNNNSNFAWTGATKYHLNGRNSLTNPGVAMATNKDDEGQFFPINGVLVFGKTGAANKTTLENVLMTSEEEIKTTNPVATEEYGVVSSNLQSSTAGPQTQTVNSQGALPGMVWQNRDVYLQGPIWAKIPHTDGNFHPSPLMGGFGLKHPPPQILIKNTPVPANPPGVFTPALFASFITQYSTGQVSVEIEWELQKENSKRWNPEIQYTSNYAKSNNVEFAVNNEGVYTEPRPIGTRYLTRNL

SEQ ID NO: 176 - DNA, 3098 bp, Adeno-associated virus
  source 1..3098: mol_type = unassigned DNA
gaattcgcccttcgcagagaccaaagttcaactgaaacgaatcaaccggtttattgattaacaagtaattacaggttacgggtgaggtaacgggtgccaatggggcgaggctcagtataaaccccttcgttgttgacagcaaattccacattattagacttggcataatttgaggtgtactgaatctctggattccagcgtttgctgttttctttctgcagttcccactcgatctccacgctgacctggccggtgctgtactgcgtgataaatgaggcaaactaggcaggagtaaacacccctggaggattagcaggtaccggggtgtttttgatgagaatttgaggaggcgggtgtttgagtccaaatccgcccatcaggggagacgggtgaaagttgccgtccgtgtgaggaattttggcccagatgggaccctgcaggtacacgtcccggttctgccagaccatgccgggcagagccccctggctgttgacagtctgtgtctggggtccggccgtagacgattgcaggttgctggagaccacaccgtattcttctgtagccacgggattggtggttttgatctcctcctcgctggtcattagcacgttttccagcgttgtcttgttggcagcccccgttttgccaaaaaccagcactccgttgatgggaaagaactggccctcgtcgtccttgttggtggccatggctacgcccgggttggttaatgaatttctaccattcagatggtatttagtggccccggtccaggcaaagttactgttgttgttgctgtctatgttttttgacagtctctgctgccgataacagggtccgggcagccagttctttgattgctcggccatggtgttgggcccagcctgatggaactgcagctcccttgtggaccccgtagtgctctgggtccgggccaggtagtacaggtactggtcgatgaggggattcatcagccggtccaggctctggctgtgcgcatagctgctgtggaaaggcacttcctcaaaggtgtagctgaattcaaagttattgcccgttctcagcatctgagaaggaaagtactccaggcagtagaaggaggaacgtcccatagactgactgccgttgtttagagtcagatatccgtactgaggaatcatgaacacgtccgcagggaacggagggaggcagccctggtgcgcagagccgaggacgtacggcagttggtactccgagtccgagaagacctgaatcgtgctggtaaggttattagcgatggtcgtaacgccgtcgttcgtcgtgacctccttgacctggatgttgaacaacttgaaccgcagctttctgggccggaatccccagttgttgttgatgagtcgctgccagtcacgtggtgagaagtggcagtggaatctgttgaagtcaaaatagccccagggggtgctgtagccgaagaagtggttgtcgttggtagccccgctctgacttgatatctgcttgtagaggtggttgttgtaggtgggcagggcccaggtgcgggtgctggtggtgatgactctgtcgcccagccatgtggaatcgcaatgccaatttccggaggcattacccactccgtcggcgccttcgttattgtctgccattggtgcgccaccgcctgcagccattgtaccagatcccagacctgagggcgcggcgggaggttctccgagaggttgggggtcgggcactgactctgagtcgccagtctgcccaaagttgagcttctttttagcgggctgctggcctttcttgccgatgcccgtggaggagtcgggggattctatgggtctcttctttccaggagccgtcttagcgccttcctcaaccagaccgagaggttcgagaacccgcttcttggcctggaagactgctcgcccgaggttgcccccaaaagacgtatcttcttgaagacgctcctgaaactcagcgtcggcgtggttgtacttgaggtacgggttgtccccctgctcgagctgcttgtcgtaggccttgtcgtgctcgagggccgcggcgtctgcctcgttgaccggctctcccttgtcgagtccgttgaagggtccgaggtacttgtagccaggaagcaccagaccccggccgtcgtcctgcttttgctggttggctttgggtttcggggctccaggtttcaagtcccaccactcgcgaatgccctcagagaggttgtcctcgagccaatctggaagataaccatcggcagccatacctggtttaagtcatttattgctcagaaacacagtcatccaggtccacgttgaccagatcgcaggccgagcaagcaatctcgggagcccgccccagcagatgatgaatggcacagagtttccgatacgtcctctttctgacgaccggttgagattctgacacgccggggaaacattctgaacagtctctggtcccgtgcgtgaagcaaatgttgaaattctgattcattctctcgcatgtcttgcagggaaacagcatctgaagcatgcccgcgtgacgagaacatttgttttggtacctgtcggcaaagtccaccggagctccttccgcgtctgacgtcgatggatccgcgactgaggggcaggcccgcttgggctcgcttttatccgcgtcatcgggggcgggcctcttgttggctccaccctttctgacgtagaactcatgcgccacctcggtcacgtgatcctgcgcccagcggaagaactctttgacttcctgctttgtcaccttgccaaagtcctgctccagacggcgggtgagttcaaatttgaacatccggtcttgtaacggctgctggtgctcgaaggtggtgctgttcccgtcaatcacggcgcacatgttggtgttggaagtgacgatcacgggggtgggatcgatctgggcggacgacttgcacttttggtccacgcgcaccttgctgccgccgagaatggccttggcggactccacgaccttggccgtcatcttgccctcctcccaccagatcaccatcttgtcgacgcaatcgttgaagggaaagttctcattggtccagttgacgcagccgtagaaagggcgaattc

SEQ ID NO: 177 - DNA, 2187 bp, Adeno-associated virus
  source 1..2187: mol_type = unassigned DNA
atggctgccgatggttatcttccagattggctcgagggcaacctctctgagggcattcgcgagtggtgggacttgaaacctggagccccgaaacccaaagccaaccagcaaaagcaggacgacggccggggtctggtgcttcctggctacaggtacctcggacccttcaacggactcgacaagggagagccggtcaacgaggcagacgccgcggccctcgagcacgacaaggcctacgacaagcagctcgagcagggggacaacccgtacctcaagtacaaccacgccgacgccgagtttcaggagcgtcttcaagaagatacgtcttttgggggcaacctcgggcgagcagtcttccaggccaagaagcgggttctcgaacctctcggtctggttgaggaaggcgctaagacggctcctggaaagaagagacccatagaatcccccgactcctccacgggcatcggcaagaacggccagccgcccgctaaaaagaagctcaactttgggcagactggcgactcagagtcagtgcccgacccccaacctctcggagaacctcccgccgcgccctcaggtctgggatctggtacaatggctgcaggcggtggcgcaccaatggcagacaataacgaaggcgccgacggagtgggtaatgcctccggaaattggcattgcgattccacatggctgggcgacagagtcatcaccaccagcacccgcacctgggccctgcccacctacaacaaccacctctacaagcagatatcaagtcagagcggggctaccaacgacaaccacttcttcggctacagcaccccctggggctattttgacttcaacagattccactgccacttctcaccacgtgactggcagcgactcatcaacaacaactggggattccggcccagaaagctgcggttcaagttgttcaacatccaggtcaaggaggtcacgacgaacgacggcgttacgaccatcgctaataaccttaccagcacgattcaggtcttctcggactcggagtaccaactgccgtacgtcctcggctctgcgcaccagggctgcctccctccgttccctgcggacgtgttcatgattcctcagtacggatatctgactctaaacaacggcagtcagtctgtgggacgttcctccttctactgcctggagtactttccttctcagatgctgagaacgggcgataactttgaattcagctacacctttgaggaagtgcctttccacagcagctatgcgcacagccagagcctggaccggctgatgaatcccctcatcgaccagtacctgtactacctggcccggacccagagcactacggggtccacaagggagctgcagttccatcaggctgggcccaacaccatggccgagcaatcaaagaactggctgcccggaccctgttatcggcagcagagactgtcaaaaaacatagacagcaacaacaacagtaactttgcctggaccggggccactaaataccatctgaatggtagaaattcattaaccaacccgggcgtagccatggccaccaacaaggacgacgaggaccagttctttcccatcaacggagtgctggtttttggcaaaacgggggctgccaacaagacaacgctggaaaacgtgctaatgaccagcgaggaggagatcaaaaccaccaatcccgtggctacagaagaatacggtgtggtctccagcaacctgcaatcgtctacggccggaccccagacacagactgtcaacagccagggggctctgcccggcatggtctggcagaaccgggacgtgtacctgcagggtcccatctgggccaaaattcctcacacggacggcaactttcacccgtctcccctgatgggcggatttggactcaaacacccgcctcctcaaattctcatcaaaaacaccccggtacctgctaatcctccagaggtgtttactcctgccaagtttgcctcatttatcacgcagtacagcaccggccaggtcagcgtggagatcgagtgggaactgcagaaagaaaacagcaaacgctggaatccagagattcagtacacctcaaattatgccaagtctaataatgtggaatttgctgtcaacaacgaaggggtttatactgagcctcgccccattggcacccgttacctcacccgtaacctgtaa

SEQ ID NO: 178 - protein, 728 aa, Adeno-associated virus; identical to SEQ ID NO: 173

SEQ ID NO: 179 - protein, 728 aa, Adeno-associated virus
MAADGYLPDWLEDNLSEGIREWWDLKPGAPKPKANQQKQDDGRGLVLPGYRYLGPFNGLDKGEPVNEADAAALEHDKAYDKQLEQGDNPYLKYNHADAEFQERLQEDTSFGGNLGRAVFQAKKRVLEPLGLVEEGAKTAPGKKRPIESPDSSTGIGKNGQPPAKKKLNFGQTGDSESVPDPQPLGEPPAAPSGLGSGTMAAGGGAPMADNNEGADGVGNASGNWHCDSTWLGDRVITTSTRTWALPTYNNHLYKQISSQSGATNDNHFFGYSTPWGYFDFNRFHCHFSPRDWQRLINNNWGFRPRKLRFKLFNIQVKEVTTNDGVTTIANNLTSTIQVFSDSEYQLPYVLGSAHQGCLPPFPADVFMIPQYGYLTLNNGSQSVGRSSFYCLEYFPSQMLRTGDNFEFSYTFEEVPFHSSYAHSQSLDRLMNPLIDQYLYYLARTQSTTGSTRELQFHQAGPNTMAEQSKNWLPGPCYRQQRLSKNIDSNNNSNFAWTGATKYHLNGRNSLTNPGVAMATNKDDEDQFFPINGVLVFGKTGAANKTTLENVLMTSEEEIKTTNPVATEEYGVVSSNLQSSTAGPQTQTVNSQGALPGMVWQNRDVYLQGPIWAKIPHTDGNFHPSPLMGGFGLKHPPPQILIKNTPVPANPPEVFTPAKFASFITQYSTGQVSVEIEWELQKENSKRWNPEIQYTSNYAKSNNVEFAVNNEGVYTEPRPIGTRYLTRNL

SEQ ID NO: 180 - protein, 728 aa, Adeno-associated virus; identical to SEQ ID NO: 172

SEQ ID NO: 181 - protein, 728 aa, Adeno-associated virus
MAADGYLPDWLEDNLSEGIREWWDLKPGAPKPKANQQKQDDGRGLVLPGYKYLGPFNGLDKGEPVNEADAAALEHDKAYDKQLEQGDNPYLKYNHADAEFQERLQEDTSFGGNLGRAVFQAKKRVLEPLGLVEEGAKTAPGKKRPIESPDSSTGIGKNGQPPAKKKLNFGQTGDSESVPDPQPLGEPPAAPSGLGSGTMAAGGGAPMADNNEGADGVGNASGNWHCDSTWLGDRVITTSTRTWALPTYNNHLYKQISSQSGATNDNHFFGYSTPWGYFDFNRFHCHFSPRDWQRLINNNWGFRPRKLRFKLFNIQVKEVTTNDGVTTIANNLTSTIQVFSDSEYQLPYVLGSAHQGCLPPFPADVFMIPQYGYLTLNNGSQSVGRSSFYCLEYFPSQMLRTGNNFEFSYTFEEVPFHSSYAHSQSLDRLMNPLIDQYLYYLARTQSTTGSTRELQFHQAGPNTMAEQSKNWLPGPCYRQQRLSKNIDSNNNSNFAWTGATKYHLNGRNSLTNPGVAMATNKDDEDQFFPINGVLVFGKTGAANKTTLENVLMTSEEEIKTTNPVATEEYGVVSSNLQSSTAGPQTQTVNSQGALPGMVWQNRDVYLQGPIWAKIPHTDGNFHPSPLMGGFGLKHPPPQILIKNTPVPANPPEVFTPAKFASFITQYSTGQVSVEIEWELQKENSKRWNPEIQYTSNYAKSNNVEFAVNNEGVYTEPRPIGTRYLTRNL

SEQ ID NO: 182 - protein, 728 aa, Adeno-associated virus
MAADGYLPDWLEDNLSEGIREWWDLKPGAPKPKANQQKQDDGRGLVLPGYKYLGPFNGLDKGEPVNEADAAALEHDKAYDKQLEQGDNPYLKYNHADAEFQERLQEDTSFGGNLGRAVFQAKKRVLEPLGLVEEGAKTAPGKKRPIESPDSSTGIGKKGQQPAKKKLNFGQTGDSESVPDPQPLGEPPAAPSGLGSGTMAAGGGAPMADNNEGADGVGNASGNWHCDSTWLGDRVITTSTRTWALPTYNNHLYKQISSQSGATNDNHFFGYSTPWGYFDFNRFHCHFSPRDWQRLINNNWGFRPRKLRFKLFNIQVKEVTTNDGVTTIANNLTSTIQVFSDSEYQLPYVLGSAHQGCLPPFPADVFMIPQYGYLTLNNGSQSVGRSSFYCLEYFPSQMLRTGNNFEFSYTFEEVPFHSSYAHSQSLDRLMNPLIDQYLYYLARTQSTTGSTRELQFHQAGPNTMAEQSKNWLPGPCYRQQRLSKNIDSNNNSNFAWTGATKYHLNGRNSLTNPGVAMATNKDDEDQFFPINGVLVFGKTGAANKTTLENVLMTSEEEIKTTNPVATEEYGVVSSNLQSSTAGPQTQTVNSQGALPGMVWQNRDVYLQGPIWAKIPHTDGNFHPSPLMGGFGLKHPPPQILIKNTPVPANPPEVFTPAKFASFITQYSTGQVSVEIEWELQKENSKRWNPEIQYTSNYAKSNNVEFAVNNEGVYTEPRPIGTRYLTRNL

SEQ ID NO: 183 - DNA, 2215 bp, synthetic construct
  misc_feature 1..2215: note = Description of Artificial Sequence: Synthetic polynucleotide
  source 1..2215: mol_type = other DNA
atggctgccgatggttatcttccagattggctcgaggacactctctctgaaggaataagacagtggtggaagctcaaacctggcccaccaccaccaaagcccgcagagcggcataaggacgacagcaggggtcttgtgcttcctgggtacaagtacctcggacccttcaacggactcgacaagggagagccggtcaacgaggcagacgccgcggccctcgagcacgacaaagcctacgaccggcagctcgacagcggagacaacccgtacctcaagtacaaccacgccgacgccgagttccaggagcggctcaaagaagatacgtcttttgggggcaacctcgggcgagcagtcttccaggccaaaaagaggcttcttgaacctcttggtctggttgaggaagcggctaagacggctcctggaaagaagaggcctgtagagcactctcctgtggagccagactcctcctcgggaaccggaaaggcgggccagcagcctgcaagaaaaagattgaattttggtcagactggagacgcagactcagtcccagaccctcaaccaatcggagaacctcccgcagccccctcaggtgtgggatctcttacaatggctgcaggcggtggcgcaccaatggcagacaataacgagggcgccgacggagtgggtaattcctcgggaaattggcattgcgattccacatggatgggcgacagagtcatcaccaccagcacccgaacctgggccctgcccacctacaacaaccacctctacaagcaaatctccaacagcacatctggaggatcttcaaatgacaacgcctacttcggctacagcaccccctgggggtattttgactttaacagattccactgccacttttcaccacgtgactggcagcgactcatcaacaacaactggggattccggcccaagagactcagcttcaagctcttcaacatccaggtcaaggaggtcacgcagaatgaaggcaccaagaccatcgccaataacctcaccagcaccatccaggtgtttacggactcggagtaccagctgccgtacgttctcggctctgcccaccagggctgcctgcctccgttcccggcggacgtgttcatgattccccagtacggctacctaacactcaacaacggtagtcaggccgtgggacgctcctccttctactgcctggaatactttccttcgcagatgctgagaaccggcaacaacttccagtttacttacaccttcgaggacgtgcctttccacagcagctacgcccacagccagagcttggaccggctgatgaatcctctgattgaccagtacctgtactacttgtctcggactcaaacaacaggaggcacgacaaatacgcagactctgggcttcagccaaggtgggcctaatacaatggccaatcaggcaaagaactggctgccaggaccctgttaccgccagcagcgagtatcaaagacatctgcggataacaacaacagtgaatactcgtggactggagctaccaagtaccacctcaatggcagagactctctggtgaatccgggcccggccatggcaagccacaaggacgatgaagaaaagtttttttcctcagagcggggttctcatctttgggaagcaaggctcagagaaaacaaatgtggacattgaaaaggtcatgattacagacgaagaggaaatcaggacaaccaatcccgtggctacggagcagtatggttctgtatctaccaacctccagagaggcaacagacaagcagctaccgcagatgtcaacacacaaggcgttcttccaggcatggtctggcaggacagagatgtgtaccttcaggggcccatctgggcaaagattccacacacggacggacattttcacccctctcccctcatgggtggattcggacttaaacaccctccgcctcagatcctgatcaagaacacgcctgtacctgcggatcctccgaccaccttcaaccagtcaaagctgaactctttcatcacccagtattctactggccaagtcagcgtggagatcgagtgggagctgcagaaggaaaacagcaagcgctggaaccccgagatccagtacacctccaactactacaaatctacaagtgtggactttgctgttaatacagaaggcgtgtactctgaaccccgccccattggcacccgttacctcacccgtaatctgtaa

SEQ ID NO: 184 - protein, 737 aa, synthetic construct
  REGION 1..737: note = Description of Artificial Sequence: Synthetic polypeptide
MAADGYLPDWLEDTLSEGIRQWWKLKPGPPPPKPAERHKDDSRGLVLPGYKYLGPFNGLDKGEPVNEADAAALEHDKAYDRQLDSGDNPYLKYNHADAEFQERLKEDTSFGGNLGRAVFQAKKRLLEPLGLVEEAAKTAPGKKRPVEHSPVEPDSSSGTGKAGQQPARKRLNFGQTGDADSVPDPQPIGEPPAAPSGVGSLTMAAGGGAPMADNNEGADGVGNSSGNWHCDSTWMGDRVITTSTRTWALPTYNNHLYKQISNSTSGGSSNDNAYFGYSTPWGYFDFNRFHCHFSPRDWQRLINNNWGFRPKRLSFKLFNIQVKEVTQNEGTKTIANNLTSTIQVFTDSEYQLPYVLGSAHQGCLPPFPADVFMIPQYGYLTLNNGSQAVGRSSFYCLEYFPSQMLKTGNNFQFTYTFEDVPFHSSYAHSQSLDRLMNPLIDQYLYYLSRTQTTGGTTNTQTLGFSQGGPNTMANQAKNWLPGPCYRQQRVSKTSADNNNSEYSWTGATKYHLNGRDSLVNPGPAMASHKDDEEKFFPQSGVLIFGKQGSEKTNVDIEKVMITDEEEIRTTNPVATEQYGSVSTNLQRGNRQAATADVNTQGVLPGMVWQDRDVYLQGPIWAKIPHTDGHFHPSPLMGGFGLKHPPPQILIKNTPVPADPPTTFNQSKLNSFITQYSTGQVSVEIEWELQKENSKRWNPEIQYTSNYYKSTSVDFAVNTEGVYSEPRPIGTRYLTRNL

SEQ ID NO: 185 - protein, 737 aa, synthetic construct
  REGION 1..737: note = Description of Artificial Sequence: Synthetic polypeptide
MAADGYLPDWLEDTLSEGIRQWWKLKPGPPPPKPAERHKDDSRGLVLPGYKYLGPFNGLDKGEPVNEADAAALEHDKAYDRQLDSGDNPYLKYNHADAEFQERLKEDTSFGGNLGRAVFQAKKRLLEPLGLVEEAAKTAPGKKRPVEHSPVEPDSSSGTGKAGQQPARKRLNFGQTGDADSVPDPQPIGEPPAAPSGVGSLTMAAGGGAPMADNNEGADGVGNSSGNWHCDSTWMGDRVITTSTRTWALPTYNNHLYKQISNSTSGGSSNDNAYFGYSTPWGYFDFNRFHCHFSPRDWQRLINNNWGFRPKRLSFKLFNIQVKEVTQNEGTKTIANNLTSTIQVFTDSEYQLPYVLGSAHQGCLPPFPADVFMIPQYGYLTLNNGSQAVGRSSFYCLEYFPSQMLKTGNNFQFTYTFEDVPFHSSYAHSQSLDRLMNPLIDQYLYYLSRTQTTGGTTNTQTLGFSQGGPNTMANQAKNWLPGPCYRQQRVSKTSADNNNSEYSWTGATKYHLNGRDSLVNPGPAMASHKDDEEKFFPQSGVLIFGKQGSEKTNVDIEKVMITDEEEIRTTNPVATEQYGSVSTNLQQGNTQAATADVNTQGVLPGMVWQDRDVYLQGPIWAKIPHTDGHFHPSPLMGGFGLKHPPPQILIKNTPVPADPPTTFNQSKLNSFITQYSTGQVSVEIEWELQKENSKRWNPEIQYTSNYYKSTSVDFAVNTEGVYSEPRPIGTRYLTRNL

SEQ ID NO: 186 - protein, 737 aa, synthetic construct
  REGION 1..737: note = Description of Artificial Sequence: Synthetic polypeptide
MAADGYLPDWLEDTLSEGIRQWWKLKPGPPPPKPAERHKDDSRGLVLPGYKYLGPFNGLDKGEPVNEADAAALEHDKAYDRQLDSGDNPYLKYNHADAEFQERLKEDTSFGGNLGRAVFQAKKRLLEPLGLVEEAAKTAPGKKRPVEHSPVEPDSSSGTGKAGQQPARKRLNFGQTGDADSVPDPQPIGEPPAAPSGVGSLTMAAGGGAPMADNNEGADGVGNSSGNWHCDSTWMGDRVITTSTRTWALPTYNNHLYKQISNSTSGGSSNDNAYFGYSTPWGYFDFNRFHCHFSPRDWQRLINNNWGFRPKRLSFKLFNIQVKEVTQNEGTKTIANNLTSTIQVFTDSEYQLPYVLGSAHQGCLPPFPADVFMIPQYGYLTLNNGSQAVGRSSFYCLEYFPSQMLRTGNNFQFTYTFEDVPFHSSYAHSQSLDRLMNPLIDQYLYYLSRTQTTGGTTNTQTLGFSQGGPNTMANQAKNWLPGPCYRQQRVSKTSADNNNSEYSWTGATKYHLNGRDSLVNPGPAMASHKDDEEKFFPQSGVLIFGKQGSEKTNVDIEKVMITDEEEIRTTNPVATEQYGSVSTNLQQGNTQAATADVNTQGVLPGMVWQDRDVYLQGPIWAKIPHTDGHFHPSPLMGGFGLKHPPPQILIKNTPVPADPPTTFNQSKLNSFITQYSTGQVSVEIEWELQKENSKRWNPEIQYTSNYYKSTSVDFAVNTEGVYSEPRPIGTRYLTRNL

SEQ ID NO: 187 - protein, 729 aa, Adeno-associated virus
MAADGYLPDWLEDNLSEGIREWWDLKPGAPKPKANQQKQDDGRGLVLPGYKYLGPFNGLDKGEPVNAADAAALEHDKAYDQQLKAGDNPYLRYNHADAEFQERLQEDTSFGGNLGRAVFQAKKRVLEPLGLVEEGAKTAPGKKRPIDSPDSSTGIGKKGQQPAKKKLNFGQTGDSESVPDPQPLGEPPAAPSSVGSGTMAAGGGAPTADNNEGADGVGNASGNWHCDSTWLGDRVITTSTRTWALPTYNNHLYKQISSSSSGATNDNHYFGYSTPWGYFDFNRFHCHFSPRDWQRLINNNWGFRPKKLRFKLFNIQVKEVTTNDGVTTIANNLTSTVQVFSDSEYQLPYVLGSAHQGCLPPFPADVFMIPQYGYLTLNNGSQSVGRSSFYCLEYFPSQMLRTGNNFEFSYSFEDVPFHSSYAHSQSLDRLMNPLIDQYLYYLARTQSTTGSTRELQFHQAGPNTMAEQSKNWLPGPCYRQQRLSKNLDFNNNSNFAWTAATKYHLNGRNSLTNPGIPMATNKDDEDQFFPINGVLVFGKTGAANKTTLENVLMTSEEEIKTTNPVATEEYGVVSSNLQSSTAGPQSQTINSQGALPGMVWQNRDVYLQGPIWAKIPHTDGNFHPSPLMGGFGLEHPPPQILIKNTPVPANPPEVFTPAKFASFITQYSTGQVSVEIEWELQKENSKRWNPEIQYTSNYAKSNNVEFAVNPDGVYTEPRPIGTRYLTRNL

SEQ ID NO: 188 - DNA, 3075 bp, Adeno-associated virus
  source 1..3075: mol_type = unassigned DNA
tgagaactttcctttcaacgattgcgtcggacaagatggtgatctggtgggaggaggggaagatgaccgccaaggtcgtggagtcggccaaagccattcttggaggaagcaaggtgcgtgtggaccagaaatgcaagtcctcggcccagatagacccgactcccgtgatcgtcacctccaacaccaacatgtgcgccgtgattgacgggaactcaacgaccttcgagcaccagcagccgttgcaagaccggatgttcaaatttgaacttacccgccgtctggatcatgactttggaaaggtcaccaagcaggaagtgaaagactttttccggtgggcaaaggatcacgtggttgaggtggagcatgaattctacgtcaaaaagggtggagctaagaaaagacccgcccccagtgacgcagatataagtgagcccaaacgggcgcgcgagtcagttgcgcagccatcaacgtcagacgcggaagcttcgatcaactacgcggacaggtaccaaaaacaaatgttctcgtcacgtgggcatgaatctgatgctgtttccctgcagacaatgcgagagaatgaatcagaattcaaatatctgcttcactcacggacagaaagactgtttagagtgctttcccgtgtcagaatctcaacccgtttctgtcgtcaaaaaggcgtatcagaaactgtgctacattcatcatatcatgggaaaggtgccagacgcttgcactgcctgcgatctggtcaatgtggatttggatgactgcatctctgaacaataaatgatttaaatcaggtatggctgccgatggttatcctccagattggctcgaggacactctctctgaagggataagacagtggtggaagctcaaacctggcccaccaccaccaaagcccgcagagcggcataaggacgacagcaggggtcttgtgcttcctgggtacaagtacctcggacccttcaacggactcgacaagggggagccggtcaacgaggcagacgccgcggccctcgagcacgacaaggcctacgaccggcagctcgacagcggagacaacccgtacctcaagtacaaccacgccgacgcagagtttcaggagcgccttaaagaagatacgtcttttgggggcaacctcggacgagcagtcttccaggcgaaaaagagggttcttgaacctctgggcctggttgaggaacctgttaagacggctccgggaaaaaagaggccggtagagcactctcctgtggagccagactcctcctcgggaaccggaaaagcgggccagcggcctgcaagaaaaagattaaattttggtcagactggagacgcagactccgtacctgacccccagcctctcggacagccaccagcagccccctctggtctgggatctactacaatggctacaggcagtggcgcaccaatggcagacaataacgagggtgccgatggagtgggtaattcctcaggaaattggcattgcgattcccaatggctgggcgacagagtcatcaccaccagcacccgaacctgggccctgcccacatacaacaaccacctctacaagcaaatctccagccaatcaggagccagcaacgacaaccactactttggctacagcaccccctgggggtattttgacttcaacagattccactgccacttttcaccacgtgactggcaaagactcatcaacaacaactggggattccggcccaaaagactcaacttcaagctctttaatattcaagtcaaagaggtcacgcagaatgacggtacgacgacgattgccaataaccttaccagcacggttcaggtgtttactgactcggagtaccagctcccgtacgtcctgggctcggcgcatcaaggatgcctcccgccgtttccagcggacgtcttcatggtcccacagtatggatacctcaccctgaacaacgggagtcaggcggtaggacgctcttccttttactgcctggagtactttccttctcagatgctgcgtactggaaacaactttcagttcagctacacttttgaagacgtgcctttccacagcagctacgctcacagccagagtctggatcggctgatgaatcctctgatcgaccagtacctgtattatctgaacaagacacaaacaaatagtggaactcttcagcagtctcggctactgtttagccaagctggaccaaccaacatgtctcttcaagctaaaaactggctgcctggaccttgctacagacagcagcgtctgtcaaaacaggcaaacgacaacaacaacagcaactttccctggactgcagctacaaagtatcatctaaatggccgggactcgttggttaatccaggaccagctatggccagtcacaaggatgacgaagaaaagtttttccccatgcatggaaccctgatatttggtaaacaaggaacaaatgccaacgacgcggatttggaaaatgtcatgattacagatgaagaagaaatcagggccaccaatcccgtggctacggagcagtacgggactgtgtcaaataatttgcaaaactcaaacactggtccaactactggaactgtcaatcgccaaggagcgttacctggtatggtgtggcaggatcgagacgtgtacctgcagggacccatttgggccaagattcctcacaccgatggacactttcatccttctccactgatgggaggttttggactcaaacacccgcctcctcagatcatgatcaaaaacactcccgttccagccaatcctcccacaaacttcagttctgccaagtttgcttctttcatcacacagtattccacgggacaggtcagcgtggagatcgagtgggagctgcagaaggagaacagcaaacgctggaatcccgaaattcagtacacttccaactacaacaagtctgttaatgtggactttactgtggacactaatggtgtgtattcagagcctcgccccattggcaccagatacctgactcgtaatctgtaattgcttgttaatcaataaaccgtttaattcgtttcagttgaactttggtctctgcgaagggcgaa

SEQ ID NO: 189 - DNA, 3142 bp, Adeno-associated virus
  source 1..3142: mol_type = unassigned DNA
aaaacgacgggccagtgattgtaatacgactcactatagggcgaaattgaaattagcggccgcgaattcgcctttcgcagagaccaaagttcaactgaaacgaattaaacggtttattgattaacaagcaattacagattacgagtcaggtatctggtgccaatggggcgaggctctgaatacacaccattagtgtccacagtaaagtccacattaacagacttgttgtagttggaagtgtactgaatttcgggattccagcgtttgctgttctccttctgcagctcccactcgatctccacgctgacctgtcccgtggaatactgtgtgatgaaagaagcaaacttggcagaactgaagtttgtgggaggattggctggaacgggagtgtttttgatcatgatctgaggaggcgggtgtttgagtccaaaacctcccatcagtggagaaggatgaaagtgtccatcggtgtgaggaatcttggcccaaatgggtccctgcaggtacacgtctcgatcctgccacaccataccaggtaacgctccttggtgattgacagttccagtagttggaccagtgtttgagttttgcaaattatttgacacagtcccgtactgctccgtagccacgggattggtggccctgatttcttcttcatctgtaatcatgacattttccaaatccgcgtcgttggcatttgttccttgtttaccaaatatcagggttccatgcatggggaaaaacttttcttcgtcatccttgtgactggccatagctggtcctggattaaccaacgagtcccggccatttagatgatactttgtagctgcagtccagggaaagttgctgttgttgttgtcgtttgcctgttttgacagacgctgctgtctgtagcaaggtccaggcagccagtttttagcttgaagagacatgttggttggtccagcttggctaaacagtagccgagactgctgaagagttccactatttgtttgtgtcttgttcagataatacaggtactggtcgatcagaggattcatcagccgatccagactctggctgtgagcgtagctgctgtggaaaggcacgtcttcaaaagtgtagctgaactgaaagttgtttccagtacgcagcatctgagaaggaaagtactccaggcagtaaaaggaagagcgtcctaccgcctgactcccgttgttcagggtgaggtatccatactgtgggaccatgaagacgtccgctggaaacggcgggaggcatccttgatgcgccgagcccaggacgtacgggagctggtactccgagtcagtaaacacctgaaccgtgctggtaaggttattggcaatcgtcgtcgtaccgtcattctgcgtgacctctttgacttgaatattaaagagcttgaagttgagtcttttgggccggaatccccggttgttgttgacgagtctttgccagtcacgtggtgaaaagtggcagtggaatctgttgaagtcaaaatacccccagggggtgctgtagccaaagtagtggttgtcgttgctggctcctgattggctggagatttgcttgtagaggtggttgttgtatgtgggcagggcccaggttcgggtgctggtggtgatgactctgtcgcccagccattgggaatcgcaatgccaatttcctgaggaattacccactccatcggcaccctcgttattgtctgccattggtgcgccactgcctgtagccattgtagtagatcccagaccagagggggctgctggtggctgtccgagaggctgggggtcaggtacggagtctgcgtctccagtctgaccaaaatttaatctttttcttgcaggctgctggcccgcttttccggttcccgaggaggagtctggctccacaggagagtgctctaccggcctcttttttcccggagccgtcttaacaggctcctcaaccaggcccagaggttcaagaaccctctttttcgcctggaagactgctcgtccgaggttgcccccaaaagacgtatcttctttaaggcgctcctgaaactctgcgtcggcgtggttgtacttgaggtacgggttgtctccgctgtcgagctgccggtcgtaggccttgtcgtgctcgagggccgcggcgtctgcctcgttgaccggctcccccttgtcgagtccgttgaagggtccgaggtacttgtacccaggaagcacaagacccctgctgtcgtccttatgccgctctgcgggctttggtggtggtgggccaggtttgagcttccaccactgtcttattccttcagagagagtgtcctcgagccaatctggaagataaccatcggcagccatacctgatttaaatcatttattgttcagagatgcagtcatccaaatccacattgaccagatcgcaggcagtgcaagcgtctggcacctttcccatgatatgatgaatgtagcacagtttctgatacgcctttttgacgacagaaacgggttgagattctgacacgggaaagcactctaaacagtctttctgtccgtgagtgaagcagatatttgaattctgattcattctctcgcattgtctgcagggaaacagcatcagattcatgcccacgtgacgagaacatttgttttggtacctgtccgcgtagttgatcgaagcttccgcgtctgacgtcgatggctgcgcaactgactcgcgcgcccgtttgggctcacttatatctgcgtcactgggggcgggtcttttcttagctccaccctttttgacgtagaattcatgctccacctcaaccacgtgatcctttgcccaccggaaaaagtctttcacttcctgcttggtgacctttccaaagtcatgatccagacggcgggtaagttcaaatttgaacatccggtcttgcaacggctgctggtgctcgaaggtcgttgagttcccgtcaatcacggcgcacatgttggtgttggaggtgacgatcacgggagtcgggtctatctgggccgaggacttgcatttctggtccacacgcaccttgcttcctccaagaatggctttggccgactccacgaccttggcggtcatcttcccctcctcccaccagatcaccatcttgtcgacgcaatggtaaaaggaaagttctcattgg

SEQ ID NO: 190 - protein, 735 aa, Adeno-associated virus 2
MAADGYLPDWLEDTLSEGIRQWWKLKPGPPPPKPAERHKDDSRGLVLPGYKYLGPFNGLDKGEPVNEADAAALEHDKAYDRQLDSGDNPYLKYNHADAEFQERLKEDTSFGGNLGRAVFQAKKRVLEPLGLVEEPVKTAPGKKRPVEHSPVEPDSSSGTGKAGQQPARKRLNFGQTGDADSVPDPQPLGEPPATPAAVGPTTMASGGGAPMADNNEGADGVGNASGNWHCDSTWLGDRVITTSTRTWALPTYNNHLYKQISSASTGASNDNHYFGYSTPWGYFDFNRFHCHFSPRDWQRLINNNWGFRPKRLNFKLFNIQVKEVTQNDGTTTIANNLTSTVQVFTDSEYQLPYVLGSAHQGCLPPFPADVFMIPQYGYLTLNNGSQAVGRSSFYCLEYFPSQMLRTGNNFTFSYTFEDVPFHSSYAHSQSLDRLMNPLIDQYLYYLNRTQNQSGSAQDKALLFSRGSPAGMSVQPKNWLPGPCYRQQRVSKTKTDNNNSNFTWTGASKYNLNGRESIINPGTAMASHKDDKDKFFPMSGVMIFGKESAGASNTALDNVMITDEEEIKATNPVATERFGTVAVNFQSSSTDPATGDVHVMGALPGMVWQDRDVYLQGPIWAKIPHTDGHFHPSPLMGGFGLKHPPPQILIKNTPVPANPPAEFSATKFASFITQYSTGQVSVEIEWELQKENSKRWNPEVQYTSNYAKSANVDFTVDNNGLYTEPRPIGTRYLTRP

SEQ ID NO: 191 - protein, 740 aa, Adeno-associated virus 2
MAADGYLPDWLEDTLSEGIRQWWKLKPGPPPPKPAERHKDDSRGLVLPGYKYLGPFNGLDKGEPVNAADAAALEHDKAYDRQLDSGDNPYLKYNHADAEFQERLKEDTSFGGNLGRAVFQAKKRVLEPLGLVEEPVKTAPGKKRPVEHSPVEPDSSSGTGKAGQQPARKRLNFGQTGDADSVPDPQPLGQPPAAPSGLGTNTMATGSGAPMADNNEGADGVGNSSGNWHCDSTWMGDRVITTSTRTWALPTYNNHLYKQISSQSGASNDNHYFGYSTPWGYFDFNRFHCHFSPRDWQRLINNNWGFRPKRLNFKLFNIQVKEVTQNDGTTTIANNLTSTVQVFTDSEYQLPYVLGSAHQGCLPPFPADVFMVPQYGYLTLNNGSQAVGRSSFYCLEYFPSQMLRTGNNFTFSYTFEDVPFHSSYAHSQSLDRLMNPLIDQYLYYLSRTNTPSGTTTQSGLQFSQAGASDIRDQSRNWLPGPCYRQQRVSKTSADNNNSEYSWTGATKYHLNGRDSLVNPGPAMASHKDDEEKFFPQSGVLIFGKQGSEKTNVDIEKVMITDEEEIRTTNPVATEQYGSVSTNLQRGNRQAATADVNTQGVLPGMVWQDRDVYLQGPIWAKIPHTDGHFHPSPLMGGFGLKHPPPQILIKNTPVPANPSTTFSAAKFASFITQYSTGQVSVEIEWELQKENSKRWNPEIQYTSNYNKSVNVDFTVDTNGVYSEPRPIGTRYLTRNLLLAAA

SEQ ID NO: 192 - protein, 734 aa, Adeno-associated virus 2
MAADGYLPDWLEDTLSEGIRQWWKLKPGPPPPKPAERHKDDSRGLVLPGYKYLGPFNGLDKGEPVNEADAAALEHDKAYDRQLDSGDNPYLKYNHADAEFQERLKEDTSFGGNLGRAVFQAKKRVLEPLGLVEEPVKTAPGKKRPVEHSPVEPDSSSGTGKAGQQPARKRLNFGQTGDADSVPDPQPLGQPPAAPSGLGTNTMATGSGAPMADNNEGADGVGNSSGNWHCDSTWMGDRVITTSTRTWALPTYNNHLYKQISSQSGASNDNHYFGYSTPWGYFDFNRFHCHFSPRDWQRLINNNWGFRPKRLNFKLFNIQVKEVTQNDGTTTIANNLTSTVQVFTDSEYQLPYVLGSAHQGCLPPFPADVFMVPQYGYLTLNNGSQAVGRSSFYCLEYFPSQMLRTGNNFTFSYTFEDVPFHSSYAHSQSLDRLMNPLIDQYLYYLSRTNTPSGTTTQSGLQFSQAGASDIRDQSRNWLPGPCYRQQRVSKTSADNNNSEYSWTGATMYHLNGRDSLVNPGPAMASHKDDEEKFFPQSGVLIFGKQGSEKTNVDIEKVMITDEEEIRTTNPVATEQYGSVSTNLQRGNRQAATADVNTQGVLPGMVWQDRDVYLQGPIWAKIPHTDGHFHPSPLMGGFGLKHPPPQILIKNTPVPANPSTTFSAAKFASFITQYSTGQVSVEIEWELQKENSKRWNPEIQYTSNYNKSINVDFTVDTNGVYSEPRPIGTRYLTRN

SEQ ID NO: 193 - protein, 734 aa, Adeno-associated virus 2
MAADGYLPDWLEDTLSEGIRQWWKLKPGPPPPKPAERHKDDSRGLVLPGYKYLGPFNGLDKGEPVNEADAAALEHDKAYDRQLDSGDNPYLKYNHADAEFQERLKEDTSFGGNLGRAVFQAKKRVLEPLGLVEEPVKTAPGKKRPVEHSPVEPDSSSGTGKAGQQPARKRLNFGQTGDADSVPDPQPLGQPPAAPSGLGTNTMATGSGAPMADNNEGADGVGNSSGNWHCDSTWMGDRVITTSTRTWALPTYNNHLYKQISSQSGASNDNHYFGYSTPWGYFDFNRFHCHFSPRDWQRLINNNWGFRPKRLNFKLFNIQVKEVTQNDGTTTIANNLTSTVQVFTDSEYQLPYVLGSAHQGCLPPFPADVFMVPQYGYLTLNNGSQAVGRSSFYCLEYFPSQMLRTGNNFTFSYTFEDVPFHSSYAHSQSLDRLMNPLIDQYLYYLSRTNTPSGTTTQSGLQFSQAGASDIRDQSRNWLPGPCYRQQRVSKTSADNNNSEYSWTGATKYHLNGRDSLVNPGPAMASHKDDEEKFFPQSGVLIFGKQGSEKTNVDIEKVMITDEEEIRTTNPVATEQYGSVSTNLQRGNRQAATADVNTQGVLPGMVWQDRDVYLQGPIWAKIPHTDGHFHPSPLMGGFGLKHPPPQILIKNTPVPANPSTTFSEAKFASFITQYSTGQVSVEIEWELQKENSKRWNPEIQYTSNYNKSVNVDFTVDTNGVYSEPRPIGTRYLTRN

SEQ ID NO: 194 - protein, 739 aa, Adeno-associated virus 2
MAADGYLPDWLEDTLSEGIRQWWKLKPGPPPPKPAERHKDDSRGLVLPGYKYLGPFNGLDKGEPVNEADAAALEHDKAYDRQLDSGDNPYLKYNHADAEFQERLKEDTSFGGNLGRAVFQAKKRVLEPLGLVEEPVKTAPGKKRPVEHSPVEPDSSSGTGKAGQQPARKRLNFGQTGDADSVPDPQPLGQPPAAPSGLGTNTMATGSGAPMADNNEGADGVGNSSGNWHCDSTWMGDRVITTSTRTWALPTYNNHLYKQISSQSGASNDNHYFGYSTPWGYFDFNRFHCHFSPRDWQRLINNNWGFRPKRLNFKLFNIQVKEVTQNDGTTTIANNLTSTVQVFTDSEYQLPYVLGSAHQGCLPPFPADVFMVPQYGYLTLNNGSQAVGRSSFYCLEYFPSQMLRTGNNFTFSYTFEDVPFHSSYAHSQSLDRLMNPLIDQYLYYLSRTNTPSGTTTQSGLQFSQAGASDIRDQSRNWLPGPCYRQQRVSKTSADNNNSEYSWTGATKYHLNGRDSLVNPGPAMASHKDDEEKFFPQSGVLIFGKQGSEKTNVDIEKVMITDEEEIRTTNPVATEQYGSVSTNLQRGNRQAATADVNTQGVLPGMVWQDRDVYLQGPIWAKIPHTDGHFHPSPLMGGFGLKHPPPQILIKNTPVPANPSTTFSAAKFASFITQYSTGQVSVEIEWELQKENSKRWNPEIQYTSNYNKSVNVDFTVDTNGVYSEPRPIGTRYLTRNLLLAA

SEQ ID NO: 195 - protein, 725 aa, Adeno-associated virus 2
MAADGYLPDWLEDTLSEGIRQWWKLKPGPPPPKPAERHKDDSRGLVLPGYKYLGPFNGLDKGEPVNEADAAALEHDKAYDRQLDSGDNPYLKYNHADAEFQERLKEDTSFGGNLGRAVFQAKKRVLEPLGLVEEPVKTAPGKKRPVEHSPVEPDSSSGTGKAGQQPARKRLNFGQTGDADSVPDPQPLGQPPAAPSGLGTNTMATGSGAPMADNNEGADGVGNSSGNWHCDSTWMGDRVITTSTRTWALPTYNNHLYKQISSQSGASNDNHYFGYSTPWGYFDFNRFHCHFSPRDWQRLINNNWGFRPKRLNFKLFNIQVKEVTQNDGTTTIANNLTSTVQVFTDSEYQLPYVLGSAHQGCLPPFPADVFMVPQYGYLTLNNGSQAVGRSSFYCLEYFPSQMLRTGNNFTFSYTFEDVPFHSSYAHSQSLDRLMNPLIDQYLYYLSRTNTPSGTTTQSGLQFSQAGASDIRDQSRNWLPGPCYRQQRVSKTSADNNNSEYSWTGATKYHLNGRDSLVNPGPAMASHKDDEEKFFPQSGVLIFGKQGSEKTNVDIEKVMITDEEEIRTTNPVATEQYGSVSTNLQRGNRQAATADVNTQGVLPGMVWQDRDVYLQGPIWAKIPHTDGHFHPSPLMGGFGLKHPPPQILIKNTPVPANPSTTFSAAKFASFITQYSTGQVSVEIEWELQKENSKRWNPEIQYTSNYNKSVNVDFTVDTNGVYSEPRP

SEQ ID NO: 196 - protein, 707 aa, Adeno-associated virus 2
MAADGYLPDWLEDTLSEGIRQWWKLKPGPPPPKPAERHKDDSRGLVLPGYKYLGPFNGLDKGEPVNEADAAALEHDKAYDRQLDSGDNPYLKYNHADAEFQERLKEDTSFGGNLGRAVFQAKKRVLEPLGLVEEPVKTAPGKKRPVEHSPVEPDSSSGTGKAGQQPARKRLNFGQTGDADSVPDPQPLGQPPAAPSGLGTNTMATGSGAPMADNNEGADGVGNSSGNWHCDSTWMGDRVITTSTRTWALPTYNNHLYKQISSQSGASNDNHYFGYSTPWGYFDFNRFHCHFSPRDWQRLINNNWGFRPKRLNFKLFNIQVKEVTQNDGTTTIANNLTSTVQVFTDSEYQLPYVLGSAHQGCLPPFPADVFMVPQYGYLTLNNGSQAVGRSSFYCLEYFPSQMLRTGNNFTFSYTFEDVPFHSSYAHSQSLDRLMNPLIDQYLYYLSRTNTPSGTTTQSGLQFSQAGASDIRDQSRNWLPGPCYRQQRVSKTSADNNNSEYSWTGATKYHLNGRDSLVNPGPAMASHKDDEEKFFPQSGVLIFGKQGSEKTNVDIEKVMITDEEEIRTTNPVATEQYGSCIYQPPERQQTSSYRRCQHTRRSSRHGLAGQRCVPSGAHLGKDSTHGRTFSPLSPHGWIRTTPSSTDSHQEHPGTCESFDHLQCGKVCFLHHTVLHGTGQRGDRVRAAEGKQQTLESRNSVHFQLQQVC

SEQ ID NO: 197 - protein, 739 aa, Adeno-associated virus 2; identical to SEQ ID NO: 194

SEQ ID NO: 198 - protein, 737 aa, Adeno-associated virus 2
MASDGYLPDWLEDNLSEGIREWWDLKPGAPKPKANQQKQDDGRGLVLPGYKYLGPFNGLDKGEPVNAADAAALEHDKAYDQQLKAGDNPYLRYNHADAEFQERLQEDTSFGGNLGRAVFQAKKRVLEPFGLVEEGAKTAPGKKRPVEQSPQEPDSSSGIGKTGQQPAKKRLNFGQTGDSESVPDPQPLGEPPATPAAVGPTTMASGGGAPMADNNEGADGVGNASGNWHCDSTWLGDRVITTSTRTWALPTYNNHLYKQISSASTGASNDNHYFGYSTPWGYFDFNRFHCHFSPRDWQRLINNNWGFRPKRLNFKLFNIQVKEVTTNDGTTTIANNLTSTVQVFTDSEYQLPYVLGSAHQGCLPPFPADVFMVPQYGYLTLNNGSQAVGRSSFYCLEYFPSQMLRTGNNFTFSYTFEDVPFHSSYAHSQSLDRLMNPLIDQYLYYLSRTNTPSGTTTQSGLQFSQAGASDIRDQSRNWLPGPCYRQQRVSKTSADNNNSEYSWTGATKYHLNGRDSLVNPGPAMASHKDDEEKFFPQSGVLIFGKQGSEKTNVDIEKVMITDEEEIRTTNPVATEQYGSVSTNLQRGNRQAATADVNTQGVLPGMVWQDRDVYLQGPIWAKIPHTDGHFHPSPLMGGFGLKHHPPQILIKNTPVPANPSTTFSAAKFASFITQYSTGQVSVEIEWELQKENSKRWNPEIQYTSNYNKSVNVDFTVDTNGVYSEPRPIGTRYLTRNLL

SEQ ID NO: 199 - protein, 741 aa, Adeno-associated virus 2
MAADGYLPDWLEDTLSEGIREWWALKPGAPKPKANQQKQDDGRGLVLPGYKYLGPFNGLDKGEPVNEADAAALEHDKAYDQQLQAGDNPYLRYNHADAEFQERLQEDTSFGGNLGRAVFQAKKRVLEPLGLVEEPVKTAPGKKRPVEHSPVEPDSSSGTGKSGQQPARKRLNFGQTGDADSVPDPQPLGQPPAAPSGLGTNTMATGSGAPMADNNEGADGVGNSSGNWHCDSTWMGDRVITTSTRTWALPTYNNHLYKQISSQSGASNDNHYFGYSTPWGYFDFNRFHCHFSPRDWQRLINNNWGFRPKRLNFKLFNIQVKEVTQNDGTTTIANNLTSTVQVFTDSEYQLPYVLGSAHQGCLPPFPADVFMVPQYGYLTLNNGSQAVGRSSFYCLEYFPSQMLRTGNNFTFSYTFEDVPFHSSYAHSQSLDRLMNPLIDQYLYYLSRTNTPSGTTTQSGLQFSQAGASDIRDQSRNWLPGPCYRQQRVSKTSADNNNSEYSWTGATKYHLNGRDSLVNPGPAMASHKDDEEKFFPQSGVLIFGKQGSEKTNVDIEKVMITDEEEIRTTNPVATEQYGSVSTNLQRGNLANHNNTTNARQAATADVNTQGVLPGMVWQDRDVYLQGPIWAKIPHTDGHFHPSPLMGGFGLKHPPPQILIKNTPVPANPSTTFSAAKFASFITQYSTGQVSVEIEWELQKENSKRWNPEIQYTSNYNKSINVDFTVDTNGVYSEPRPIGTRYL

SEQ ID NO: 200 - protein, 730 aa, Adeno-associated virus 2
MASDGYLPDWLEDNLSEGIREWWDLKPGAPKPKANQQKQDDGRGLVLPGYKYLGPFNGLDKGEPVNAADAAALEHDKAYDQQLKAGDNPYLRYNHADAEFQERLQEDTSFGGNLGRAVFQAKKRVLEPFGLVEEGAKTAPGKKRPVEQSPQEPDSSSGIGKTGQQPAKKRLNFGQTGDSESVPDPQPLGEPPATPAAVGPTTMASGGGAPMADNNEGADGVGNASGNWHCDSTWLGDRVITTSTRTWALPTYNNHLYKQISSASTGASNDNHYFGYSTPWGYFDFNRFHCHFSPRDWQRLINNNWGFRPKRLNFKLFNIQVKEVTTNDGVTTIANNLTSTVQVFSDSEYQLPYVLGSAHQGCLPPFPADVFMIPQYGYLTLNNGSQAVGRSSFYCLEYFPSQMLRTGNNFTFSYTFEDVPFHSSYAHSQSLDRLMNPLIDQYLYYLNRTQNQSGSAQNNDLLFSRGSPAGMSVQPKNWLPGPCYRQQRVSKTKTDNNNSNFTWTGASKYNLNGRESIINPGTAMASHKDDKDKFFPMSGVMIFGKESAGASNTALDNVMITDEEEIKATNPVATERFGTVAVNLQSSSTDPATGDVHVMGALPGMVWQDRDVYLQGPIWAKIPHTDGHFHPSPLMGGFGLKNPPPQILIKNTPVPANPPAEFSATKFASFITQYSTGQVSVEIEWELQKENSKRWNPEVQYTSNYAKSANVDFTVDNNGLYTEPRPIGTR

SEQ ID NO: 201 - protein, 735 aa, Adeno-associated virus 2
  VARIANT 239: note = MOD_RES - Any amino acid
MASDGYLPDWLEDNLSEGIREWWDLKPGAPKPKANQQKQDDGRGLVLPGYKYLGPFNGLDKGEPVNAADAAALEHDKAYDQQLKAGDNPYLRYNHADAEFQERLQEDTSFGGNLGRAVFQAKKRVLEPFGLVEEGAKTAPGKKRPVEQSPQEPDSSSGIGKTGQQPAKKRLNFGQTGDSESVPDPQPLGEPPATPAAVGPTTMASGGGAPMADNNEGADGVGNASGNWHCDSTWLGDRXITTSTRTWALPTYNNHLYKQISSASTGASNDNHYFGYSTPWGYFDFNRFHCHFSPRDWQRLINNNWGFRPKRLNFKLFNIQVKEVTTNDGVTTIANNLTSTVQVFSDSEYQLPYVLGSAHQGCLPPFPADVFMIPQYGYLTLNNGSQAVGRSSFYCLEYFPSQMLRTGNNFTFSYTFEDVPFHSSYAHSQSLDRLMNPLIDQYLYYLNRTQNQSGSAQNNDLLFSRGSPAGMSVQPKNWLPGPCYRQQRVSKTKTDNNNSNFTWTGASKYNLNGRESIINPGTAMASHKDDKDKFFPMSGVMIFGKESAGASNTALDNVMITDEEEIKATNPVATERFGTVAVNLQSSSTDPATGDVHVMGALPGMVWQDRDVYLQGPIWAKIPHTDGHFHPSPLMGGFGLKNPPPQILIKNTPVPANPPAEFSATKFASFITQYSTGQVSVEIEWELQKENSKRWNPEVQYTSNYAKSANVDFTVDNNGLYTEPRPIGTRYLTRP

SEQ ID NO: 202 - protein, 733 aa, Adeno-associated virus 2
MASDGYLPDWLEDNLSEGIREWWDLKPGAPKPKANQQKQDDGRGLVLPGYKYLGPFNGLDKGEPVNAADAAALEHDKAYDQQLKAGDNPYLRYNHADAEFQERLQEDTSFGGNLGRAVFLAKKRVLEPFGLVEEGAKTAPGKKRPVEQSPQEPDSSSGIGKTGQQPAKKRLNFGQTGDSESVPDPQPLGEPPATPAAVGPTTMASGGGAPMADNNEGADGVGNASGNWHCDSTWLGDRVITTSTRTWALPTYNNHLYKQISSASTGASNDNHYFGYSTPWGYFDFNRFHCHFSPRDWQRLINNNWGFRPKRLNFKLFNIQVKEVTTNDGVTTIANNLTSTVQVFSDSEYQLPYVLGSAHQGCLPPFPADVFMIPQYGYLTLNNGSQAVGRSSFYCLEYFPSQMLRTGNNFTFSYTFEDVPFHSSYAHSQSLDRLMNPLIDQYLYYLNRTQNQSGSAQNNDLLFSRGSPAGMSVQPKNWLPGPCYRQQRVSKTKTDNNNSNFTWTGASKYNLNGRESIINPGTAMASHKDDKDKFFPMSGVMIFGKESAGASNTALDNVMITDEEEIKATNPVATERFGTVAVNLQSSSTDPATGDVHVMGALPGMVWQDRDVYLQGPIWAKIPHTDGHFHPSPLMGGFGLKNPPPQILIKNTPVPANPPAEFSATKFASFITQYSTGQVSVEIEWELQKENSKRWNPEVQYTSNYAKSANVDFTVDNNGLYTEPRPIGTRYLT

SEQ ID NO: 203 - protein, 734 aa, Adeno-associated virus 2
MAADGYLPDWLEDTLSEGIRQWWKLKPGPPPPKPAERHKDDSRGLVLPGCKYLGPFNGLDKGEPVNEADAAALEHDKAYDRQLDSGDNPYLKYNHADAEFQERLKEDTSFGGNLGRAVFQAKKRVLEPLGLVEEPVKTAPGKKRPVEHSPVEPDSSSGTGKAGQQPARKRLNFGQTGDADSVPDPQPLGQPPAAPSGLGTNTMATGSGAPMADNNEGADGVGNSSGNWHCDSTWMGDRVITTSTRTWALPTYNNHLYKQISSQSGASNDNHYFGYSTPWGYFDFNRFHCHFSPRDWQRLINNNWGFRPKRLNFKLFNIQVKEVTQNDGTTTIANNLTSTVQVFSDSEYQLPYVLGSAHQGCLPPFPADVFMIPQYGYLTLNNGSQAVGRSSFYCLEYFPSQMLRTGNNFTFNYTFEDVPFHSSYAHSQSLDRLMNPLIDQYLYYLNRTQNQSGSAQNNDLLFSRGSPAGMSVQPKNWLPGPCYRQQRVSKTKTDNNNSNFTWTGASKYNLNGRESIINPGTAMASHKDDKDKFFPMSGVMIFGKESAGASNTALDNVMITDEEEIKATNPVATERFGTVAVNLQSSSTDPATGDVHVMGALPGMVWQDRDVYLQGPIWAKIPHTDGHFHPSPLMGGFGLKNPPPQILIKNTPVPANPPAEFSATKFASFITQYSTGQVSVEIEWELQKENSKRWNPEVQYTSNYAKSANVDFTVDNNGLYTEPRPIGTRYLTRP

SEQ ID NO: 204 - protein, 734 aa, Adeno-associated virus 2
MAADGYLPDWLEDTLSEGIRQWWKLKPGPPPPKPAERHKDDSRGLVLPGYKYLGPFNGLDKGEPVNEADAAALEHDKAYDRQLDSGDNPYLKYNHADAEFQERLKEDTSFGGNLGRAVFQAKKRVLEPLGLVEEPVKTAPGKKRPVEHSPVEPDSSSGTGKAGQQPARKRLNFGQTGDADSVPDPQPLGQPPAAPSGLGTNTMATGSGAPMADNNEGADGVGNSSGNWHCDSTWMGDRVITTSTRTWALSTYNNHLYKQISSQSGASNDNHYFGYSTPWGYFDFNRFHCHFSPRDWQRLINNNWGFRPKRLNFKLFNIQVKEVTQNDGTTTIANNLTSTVQVFTDSEYQLPYVLGSAHQGCLPPFPADVFMVPQYGYLTLNNGSQAVGRSSFYCLEYFPSQMLRTGNNFTFSYTFEDVPFHSSYAHSQSLDRLMNPLIDQYLYYLSRTNTPSGTTTQSRLQFSQAGASDIRDQSRNWLPGPCYRQQRVSKTSADNNNSEYSWTGATKYHLNGRDSLVNPGPAMASHKDDEEKFFPQSGVLIFGKQGSEKTNVDIEKVMITDEEEIRTTNPVATEQYGSVSTNLQRGNRQAATADVNTQGVLPGMVWQDRDVYLQGPIWAKIPHTDGHFHPSPLMGGFGLKHPPPQILIKNTPVPANPSTTFSAAKFASFITQYSTGQVSVEIEWELQKENSKRWNPEIQYTSNYNKSINVDFTVDTNGVYSEPRPIGTRYLTRN

SEQ ID NO: 205 - protein, 738 aa, Adeno-associated virus 2
MAADGYLPDWLEDTLSEGIRQWWKLKPGPPPPKPAERHKDDSRGLVLPGYKYLGPFNGLDKGEPVNEADAAALEHDKAYDRQLDGGDNPYLKYNHADAEFQERLKEDTSFGGNLGRAVFQAKKRVLEPLGLVEEPVKTAPGKKRPVEHSPVEPDSSSGTGKAGQQPARKRLNFGQTGDADSVPDPQPLGQPPAAPSGLGTNTMATGSGAPMADNNEGADGVGNSSGNWHCDSTWMGDRVITTSTRTWALPTYNNHLYKQISSQSGASNDNHYFGYSTPWGYFDFNRFHCHFSPRDWQRLINNNWGFRPKRLNFKLFNIQVKEVTQNDGTTTIANNLTSTVQVFTDSEYQLPYVLGSAHQGCLPPFPADVFMVPQYGYLTLNNGSQAVGRSSFYCLEYFPSQMLRTGNNFTFSYTFEDVPFHSSYAHSQSLDRLMNPLIDQYLYYLSRTNTPSGTTTQSGLQFSQAGASDIRDQSRNWLPGPCYRQQRVSKTSADNNNSEYSWTGATKYHLNGRDSLVNPGPAMASHKDDEEKFFPQSGVLIFGKQGSEKTNVDIEKVMITDEEEIRTTNPVATEQYGSVSTNLQRGNRQAATADVNTQGVLPGMVWQDRDVYLQGPIWAKIPHTDGHFHPSPLMGGFGLKHPPPQILIKNTPVPANPSTTFSAAKFASFITQYSTGQVSVEIEWELQKENSKRWNPEIQYTSNYNKSVNVDFTVDTNGVYSEPRPIGTRYLTRNLLRP

SEQ ID NO: 206 - DNA, 2208 bp, Adeno-associated virus
  source 1..2208: mol_type = unassigned DNA
atggctgccgatggttatcttccagattggctcgaggacactctctctgaaggaataagacagtggtggaagctcaaacctggcccaccaccaccaaagcccgcagagcggcataaggacgacagcaggggtcttgtgcttcctgggtacaagtacctcggacccttcaacggactcgacaagggggagccggtcaacgaggcagacgccgcggccctcgagcacgacaaggcctacgaccggcagctcgacagcggagacaacccgtacctcaagtacaaccacgccgacgcagagtttcaggagcgccttaaagaagatacgtcttttgggggcaacctcggacgagcagtcttccaggcgaaaaagagggttcttgaacctctgggcctggttgaggaacctgttaagacggctccgggaaaaaagaggccggtagagcactctcctgtggagccagactcctcctcgggaaccggaaaagcgggccagcagcctgcaagaaaaagattaaattttggtcagactggagacgcagactccgtacctgacccccagcctctcggacagccaccagcagccccctctggtctgggatctactacaatggctacaggcagtggcgcaccaatggcagacaataacgagggtgccgatggagtgggtaattcctcaggaaattggcattgcgattcccaatggctgggcgacagagtcatcaccaccagcacccgaacctgggccctgcccacatacaacaaccacctctacaagcaaatctccagccaatcaggagccagcaacgacaaccactactttggctacagcaccccctgggggtattttgacttcaacagattccactgccacttttcaccacgtgactggcaaagactcatcaacaacaactggggattccggcccaaaagactcaacttcaagctctttaatattcaagtcaaagaggtcacgcagaatggcggtacgacgacgattgccaataaccttaccagcacggttcaggtgtttactgactcggagtaccagctcccgtacgtcctgggctcggcgcatcaaggatgcctcccgccgtttccagcggacgtcttcatggtcccacagtatggatacctcaccctgaacaacgggagtcaggcggtaggacgctcttccttttactgcctggagtactttccttctcagatgctgcgtactggaaacaactttcagttcagctacacttttgaagacgtgcctttccacagcagctacgctcacagccagagtctggatcggctgatgaatcctctgatcgaccagtacctgtattatctgaacaagacacaaacaaatagtggaactcttcagcagtctcggctactgtttagccaagctggaccaaccaacatgtctcttcaagctaaaaactggctgcctggaccttgctacagacagcagcgtctgtcaaaacaggcaaacggcaacaacaacagcaactttccctggactgcagctacaaagtatcatctaaatggccgggactcgttggttaatccaggaccagctatggccagtcacaaggatgacgaagaaaagtttttccccatgcatggaaccctgatatttggtaaacaaggaacaaatgccaacgacgcggatttggaaaatgtcatgattacagatgaagaagaaatcagggccaccaatcccgtggctacggagcagtacgggactgtgtcaaataatttgcaaaactcaaacactggtccaactactggaactgtcaatcaccaaggagcgttacctggtatggtgtggcaggatcgagacgtgtacctgcagggacccatttgggccaagattcctcacaccgatggacactttcatccttctccactgacgggaggttttggactcaaacacccgcctcctcagatcatgatcaaaaacactcccgttccagccaatcctcccacaaacttcagttctgccaagtttgcttctttcatcacacagtattccacgggacaggtcagcgtggagatcgagtgggagctgcagaaggagaacagcaaacgctggaatcccgaaattcagtacacttccaactacaacaagtctgttaatgtggactttactgtggacactaatggtgtgtattcagagcctcgccccattggcaccagatacctgactcgtaatctgtaa

SEQ ID NO: 207 - protein, 735 aa, Adeno-associated virus
MAADGYLPDWLEDTLSEGIRQWWKLKPGPPPPKPAERHKDDSRGLVLPGYKYLGPFNGLDKGEPVNEADAAALEHDKAYDRQLDSGDNPYLKYNHADAEFQERLKEDTSFGGNLGRAVFQAKKRVLEPLGLVEEPVKTAPGKKRPVEHSPVEPDSSSGTGKAGQQPARKRLNFGQTGDADSVPDPQPLGQPPAAPSGLGSTTMATGSGAPMADNNEGADGVGNSSGNWHCDSQWLGDRVITTSTRTWALPTYNNHLYKQISSQSGASNDNHYFGYSTPWGYFDFNRFHCHFSPRDWQRLINNNWGFRPKRLNFKLFNIQVKEVTQNGGTTTIANNLTSTVQVFTDSEYQLPYVLGSAHQGCLPPFPADVFMVPQYGYLTLNNGSQAVGRSSFYCLEYFPSQMLRTGNNFQFSYTFEDVPFHSSYAHSQSLDRLMNPLIDQYLYYLNKTQTNSGTLQQSRLLFSQAGPTNMSLQAKNWLPGPCYRQQRLSKQANGNNNSNFPWTAATKYHLNGRDSLVNPGPAMASHKDDEEKFFPMHGTLIFGKQGTNANDADLENVMITDEEEIRATNPVATEQYGTVSNNLQNSNTGPTTGTVNHQGALPGMVWQDRDVYLQGPIWAKIPHTDGHFHPSPLTGGFGLKHPPPQIMIKNTPVPANPPTNFSSAKFASFITQYSTGQVSVEIEWELQKENSKRWNPEIQYTSNYNKSVNVDFTVDTNGVYSEPRPIGTRYLTRNL

SEQ ID NO: 208 - DNA, 2208 bp, Adeno-associated virus
  source 1..2208: mol_type = unassigned DNA
atggctgccgatggttatcttccagattggctcgaggacactctctctgaaggaataagacagtggtggaagctcaaacctggcccaccaccaccaaagctcgcagagcggcatcaggacgacagcaggggtcttgtgcttcctgggtacaagtacctcggacccttcaacggactcgacaaaggagagccggtcaacgaggcagacgccgcggccctcgagcacgacaaggcctacgaccggcagctcgacagcggagacaacccgtacctcaagtacaaccacgccgacgcggagtttcaggagcgtcttaaagaagatacgtcttttgggggcaacctcggacgagcagtcttccaggcgaaaaagagggttcttgaacctctgggcctggttgaggaacctgttaagacggctccgggaaaaaagaggccggtagagcactctcctgtggagccagactcctcctcgggaaccggaaaggcgggccatcagcctgcgagaaagagattgaattttggtcagactggagacgcagactccgtacctgacccccagcctctcggacagccaccagcagcccccacaagtctgggatctactacaatggctacaggcagtggcgcaccaatggcagacaataacgagggtgccgatggagtgggtaattcctcaggaaattggcattgcgattcccaatggctgggcgacagagtcatcaccaccagcacccgaacctgggccctgcccacctacaacaaccacctctacaagcaaatctccagccaatcaggagcctcgaacgacaaccactactttggctacagcaccccctgggggtattttgacttcaacagattccactgtcacttctccccacgtgattggcaaagactcatcaacaacaactggggattccgacccaagagactcaacttcaagctctttaacattcaagtcaaagaggtcacgcagaatgacggtacgacgacgattgccaataaccttaccagcacggttcaggtgtttactgactcggagtaccagctcccgtacgtcctcggctcggcgcatcaaggatgcctcccgccgtttccagcggacgtcttcacggtcccacagtatggatacctcaccctgaacaacgggagtcaggcggtaggacgctcttccttttactgcctggagtactttccttctcagatgctgcgtactggaaacaaccttaccttcagctacacctttgaggacgttcctttccacagcagctacgctcacagccagagtttggaccggctgatgaatcctctgatcgaccagtatctatattatctgaacaggacacaatcaaatagtggaactcttcagcagtctaggctactgtttagccaagctggacccaccagcatgtctcttcaagctaaaaactggctgcctggaccttgctacagacagcagcgtctttcaaagcaggcaaacgacaacaacaacagcaactttccctggactgcggctacaaagtatcatctaaatggccgggactcgttggttaatccaggaccagctatggccagccacaaagacgatgaagaaaagtttttccccatgcatggaaccctgatatttggtaaacaaggaacaaatgctaacgacgcggatttggagcatgttatgattacagatgaagaagaaatcaggaccaccaatcctgtggctacagagcagtacggaaacgtgtcaaataatttgcaaaactcaaatactggtccaactacagaaaatgtcaatcaccagggagcgttacctggtatggtgtggcaggatcgagacgtgtacctgcagggacccatttgggccaagattcctcacaccgacggacactttcacccttctccactgatgggaggttttggactcaaacacccgcctcctcaaatcatgatcaaaaacactcccgttccagccaatcctcccacaaactacagttctgccaagtttgcttctttcatcacacagtattccacgggccaggtcagcgtggagattgagtgggagctgcggaaggagaacagcaaacgctggaaccccgagatccagtatacttccaactacaacaaatctgttaatgtggactttactgtggacactaatggtgtgtattcagagcctcgccccattggcaccagatacctgactcgtaatctgtaa

SEQ ID NO: 209 - protein, 735 aa, Adeno-associated virus
MAADGYLPDWLEDTLSEGIRQWWKLKPGPPPPKLAERHQDDSRGLVLPGYKYLGPFNGLDKGEPVNEADAAALEHDKAYDRQLDSGDNPYLKYNHADAEFQERLKEDTSFGGNLGRAVFQAKKRVLEPLGLVEEPVKTAPGKKRPVEHSPVEPDSSSGTGKAGHQPARKRLNFGQTGDADSVPDPQPLGQPPAAPTSLGSTTMATGSGAPMADNNEGADGVGNSSGNWHCDSQWLGDRVITTSTRTWALPTYNNHLYKQISSQSGASNDNHYFGYSTPWGYFDFNRFHCHFSPRDWQRLINNNWGFRPKRLNFKLFNIQVKEVTQNDGTTTIANNLTSTVQVFTDSEYQLPYVLGSAHQGCLPPFPADVFTVPQYGYLTLNNGSQAVGRSSFYCLEYFPSQMLRTGNNLTFSYTFEDVPFHSSYAHSQSLDRLMNPLIDQYLYYLNRTQSNSGTLQQSRLLFSQAGPTSMSLQAKNWLPGPCYRQQRLSKQANDNNNSNFPWTAATKYHLNGRDSLVNPGPAMASHKDDEEKFFPMHGTLIFGKQGTNANDADLEHVMITDEEEIRTTNPVATEQYGNVSNNLQNSNTGPTTENVNHQGALPGMVWQDRDVYLQGPIWAKIPHTDGHFHPSPLMGGFGLKHPPPQIMIKNTPVPANPPTNYSSAKFASFITQYSTGQVSVEIEWELRKENSKRWNPEIQYTSNYNKSVNVDFTVDTNGVYSEPRPIGTRYLTRNL

SEQ ID NO: 210 - DNA, 2208 bp, Adeno-associated virus
  source 1..2208: mol_type = unassigned DNA
atggctgccgatggttatcttccagattggctcgaggacactctctctgaaggaataagacagtggtggaagctcaaacctggcccaccaccaccaaagcccgcagagcggcatcaggacgacagcaggggtcttgtgcttcctgggtacaagtacctcggacccttcaacggactcgacaaaggagagccggtcaacgaggcagacgccgcggccctcgagcacgacaaggcctacgaccggcagctcgacagcggagacaacccgtacctcaagtacaaccacgccgacgcggagtttcaggagcgtcttaaagaagatacgtcttttgggggcaacctcggacgagcagtcttccaggcgaaaaagagggttcttgaacctctgggcctggttgaggaacctgttaagacggctccgggaaaaaagaggccggtagagcactctcctgtggagccagactcctcctcgggaaccggaaaagcgggccatcagcctgcgagaaagagattgaattttggtcagactggagacgcagactccgtacctgacccccagcctctcggacagccaccagcagcccccacaagtttgggatctactacaatggctacaggcagtggcgcaccaatggcagacaataacgagggtgccgatggagtgggtaattcctcaggaaattggcattgcgattcccaatggctgggcgacagagtcatcaccaccagcacccgaacctgggccctgcccacctacaacaaccacctctacaagcaaatctccagccaatcaggagcctcgaacgacaaccactactttggctacagcaccccctgggggtattttgacttcaacagattccactgtcacttctccccacgtgattggcaaagactcatcaacaacaactggggattccgacccaagagactcaacttcaagctctttaacattcaagtcaaggaggtcacgcagaatgacggtacgacgacgattgccaataaccttaccagcacggttcaggtgtttactgactcggagtaccagctcccgtacgtcctcggctcggcgcatcaaggatgcctcccgccgtttccagcggacgtcttcatggtcccacagtatggatacctcaccctgaacaacgggagtcaggcggtaggacgctcttccttttactgcctggagtactttccttctcagatgctgcgtactggaaacaactttaccttcagctacacctttgaggacgttcctttccacagcagctacgctcacagccagagtttggaccggctgatgaatcctctgatcgaccagtatctatattatctgaacaggacacaatcaaatagtggaactcttcagcagtctaggctactgtttagccaagctggacccaccagcatgtctcttcaagctaaaaactggctgcctggaccttgctacagacagcagcgtctttcaaagcaggcaaacgacaacaacaacagcaactttccctggactgcggctacaaagtatcgtctaaatggccgggactcgttggttaatccaggaccagctatggccagccacaaagacgatgaagaaaagtttttccccatgcatggaaccctgatatttggtaaacaaggaacaaatgctaacgacgcggatttggagcatgttatgattacagatgaagaagaaatcaggaccaccaatcctgtggctacagagcagtacggaaacgtgtcaaataatttgcaaaactcaaatactggtccaactacagaaaatgtcaatcaccagggagcgttacctggtatggtgtggcaggatcgagacgtgtacctgcagggacccatttgggccaagattcctcacaccgacggacactttcacccttctccactgatgggaggttttggactcaaacacccgcctcctcaaatcatgatcaaaaacactcccgttccagccaatcctcccacaaacttcagttctgccaagtttgcttctttcatcacacagtattccacgggccaggtcagcgtggagattgagtgggagctgcagaaggagaacagcaaacgctggaaccccgagatccagtatacttccaactacaacaaatctgttaatgtggactttactgtggacactaatggtgtgtattcagagcctcgccccattggcaccagatacctgactcgtaatctgtaa

SEQ ID NO: 211 - protein, 735 aa, Adeno-associated virus
MAADGYLPDWLEDTLSEGIRQWWKLKPGPPPPKPAERHQDDSRGLVLPGYKYLGPFNGLDKGEPVNEADAAALEHDKAYDRQLDSGDNPYLKYNHADAEFQERLKEDTSFGGNLGRAVFQAKKRVLEPLGLVEEPVKTAPGKKRPVEHSPVEPDSSSGTGKAGHQPARKRLNFGQTGDADSVPDPQPLGQPPAAPTSLGSTTMATGSGAPMADNNEGADGVGNSSGNWHCDSQWLGDRVITTSTRTWALPTYNNHLYKQISSQSGASNDNHYFGYSTPWGYFDFNRFHCHFSPRDWQRLINNNWGFRPKRLNFKLFNIQVKEVTQNDGTTTIANNLTSTVQVFTDSEYQLPYVLGSAHQGCLPPFPADVFMVPQYGYLTLNNGSQAVGRSSFYCLEYFPSQMLRTGNNFTFSYTFEDVPFHSSYAHSQSLDRLMNPLIDQYLYYLNRTQSNSGTLQQSRLLFSQAGPTSMSLQAKNWLPGPCYRQQRLSKQANDNNNSNFPWTAATKYRLNGRDSLVNPGPAMASHKDDEEKFFPMHGTLIFGKQGTNANDADLEHVMITDEEEIRTTNPVATEQYGNVSNNLQNSNTGPTTENVNHQGALPGMVWQDRDVYLQGPIWAKIPHTDGHFHPSPLMGGFGLKHPPPQIMIKNTPVPANPPTNFSSAKFASFITQYSTGQVSVEIEWELQKENSKRWNPEIQYTSNYNKSVNVDFTVDTNGVYSEPRPIGTRYLTRNL

SEQ ID NO: 212 - DNA, 2208 bp, Adeno-associated virus
  source 1..2208: mol_type = unassigned DNA
atggctgccgatggttatcttccagattggctcgaggacactctctctgaaggaataagacagtggtggaagctcaaacctggcccaccaccaccaaagcccgcagagcggcatcaggacgacagcaggggtcttgtgcttcctgggtacaagtacctcggacccttcaacggactcgacaaaggagagccggtcaacgaggcagacgccgcggccctcgagcacgacaaggcctacgaccggcagctcgacagcggagacaacccgtacctcaagtacaaccacgccgacgcggagtttcaggagcgtcttaaagaagatacgtcttttgggggcaacctcggacgagcagtcttccaggcgaaaaagagggttcttgaacctctgggcctggttgaggaacctgttaagacggctccgggaaaaaagaggccggtagagcactctcctgtggagccagactcctcctcgggaaccggaaaagcgggccatcagcctgcgagaaagagattgaattttggtcagactggagacgcagactccgtacctgacccccagcctctcggacagccaccagcagcccccacaagtttgggatctactacaatggctacaggcagtggcgcaccaatggcagacaataacgagggtgccgatggagtgggtaattcctcaggaaattggcattgcgattcccaatggctgggcgacagagtcatcaccaccagcacccgaacctgggccctgcccacctacaacaaccacctctacaagcaaatctccagccaatcaggagcctcgaacgacaaccactactttggctacagcaccccctgggggtattttgacttcaacagattccactgtcacttctccccacgtgattggcaaagactcatcaacaacaactggggattccgacccaagagactcaacttcaagctctttaacattcaagtcaaagaggtcacgcagaatgacggtacgacgacgattgccaataaccttaccagcacggttcaggtgtttactgactcggagtaccagctcccgtacgtcctcggctcggcgcatcaaggatgcctcccgccgtttccagcggacgtcttcatggtcccacagtatggatacctcaccctgaacaacgggagtcaggcggtaggacgcccttccttttactgcctggagtactttccttctcagatgctgcgtactggaaacaactttaccttcagctacacctttgaggacgttcctttccacagcagctacgctcacagccagagtttggaccggctgatgaatcctctgatcgaccagtatctatattatctgaacaggacacaatcaaatagtggaactcttcagcagtctaggctactgtttagccaagctggacccaccagcatgtctcttcaagctaaaaactggctgcctggaccttgctacagacagcagcgtctttcaaagcaggcaaacgacaacaacaacagcaactttccctggactgcggctacaaagtatcatctaaatggccgggactcgttggttaatccaggaccagctatggccagccacaaagacgatgaagaaaagtttttccccatgcatgggaccctgatatttggtaaacaaggaacaaatgctaacgacgcggatttggagcatgttatgattacagatgaagaagaaatcaggaccaccaatcctgtggctacagagcagtacggaaacgtgtcaaataatttgcaaaactcaaatactggtccaactacagaaaatgtcaatcaccagggagcgttacctggtatggtgtggcaggatcgagacgtgtacctgcagggacccatttgggccaagattcctcacaccgacggacactttcacccttctccactgatgggaggttttggactcaaacacccgcctcctcaaatcatgatcaaaaacactcccgttccagccaatcctcccacaaacttcagttctgccaagtttgcttctttcatcacacagtattccacgggccaggtcagcgtggagattgagtgggagctgcagaaggagaacagcaaacgctggaaccccgagatccagtatacttccaactacaacaaatctgttaatgtggactttactgtggacactaatggtgtgtattcagagcctcgccccattggcaccagatacctgactcgtaatctgtaa

SEQ ID NO: 213 - protein, 735 aa, Adeno-associated virus
MAADGYLPDWLEDTLSEGIRQWWKLKPGPPPPKPAERHQDDSRGLVLPGYKYLGPFNGLDKGEPVNEADAAALEHDKAYDRQLDSGDNPYLKYNHADAEFQERLKEDTSFGGNLGRAVFQAKKRVLEPLGLVEEPVKTAPGKKRPVEHSPVEPDSSSGTGKAGHQPARKRLNFGQTGDADSVPDPQPLGQPPAAPTSLGSTTMATGSGAPMADNNEGADGVGNSSGNWHCDSQWLGDRVITTSTRTWALPTYNNHLYKQISSQSGASNDNHYFGYSTPWGYFDFNRFHCHFSPRDWQRLINNNWGFRPKRLNFKLFNIQVKEVTQNDGTTTIANNLTSTVQVFTDSEYQLPYVLGSAHQGCLPPFPADVFMVPQYGYLTLNNGSQAVGRPSFYCLEYFPSQMLRTGNNFTFSYTFEDVPFHSSYAHSQSLDRLMNPLIDQYLYYLNRTQSNSGTLQQSRLLFSQAGPTSMSLQAKNWLPGPCYRQQRLSKQANDNNNSNFPWTAATKYHLNGRDSLVNPGPAMASHKDDEEKFFPMHGTLIFGKQGTNANDADLEHVMITDEEEIRTTNPVATEQYGNVSNNLQNSNTGPTTENVNHQGALPGMVWQDRDVYLQGPIWAKIPHTDGHFHPSPLMGGFGLKHPPPQIMIKNTPVPANPPTNFSSAKFASFITQYSTGQVSVEIEWELQKENSKRWNPEIQYTSNYNKSVNVDFTVDTNGVYSEPRPIGTRYLTRNL

SEQ ID NO: 214 - DNA, 2208 bp, Adeno-associated virus
  source 1..2208: mol_type = unassigned DNA
atggctgccgatggttatcttccagattggctcgaggacactctctctgaaggaataagacagtggtggaagctcaaacctggcccaccaccaccaaagcccgcagagcggcataaggacgacagcaggggtcttgtgcttcctgggtacaagtacctcggacccttcaacggactcgacaagggagagccggtcaacgaggcagacgccgcggccctcgagcacgacaaggcctacgaccggcagctcgacagcggagacaacccgtacctcaagtacaaccacgccgacgcggagtttcaggagcgccttaaagaagatacgtcttttgggggcaacctcggacgagcagtcttccaggcaaaaaagagggttcttgaacctctgggcctggttgaggagcctgttaaaacggctccgggaaaaaagaggccggtagagcactctcctgcggagccagactcctcctcgggaaccggaaaagcgggccagcagcctgcaagaaaaagattgaatttcggtcagactggagacgcagactccgtacctgacccccagcctctcggacagccaccagcagccccctctggtctgggaactaatacgatggcttcaggcagtggcgcaccaatggcagacaataacgagggcgccgacggagtgggtaattcctcgggaaattggcattgcgattccacatggatgggcgacagagtcatcaccaccagcacccgaacttgggccctgcccacctacaacaaccatctctacaagcaaatctccagccaatcaggagccagcaacgacaaccactactttggctacagcaccccttgggggtattttgacttcaacagattccactgccacttttcaccacgtgactggcaaagactcatcaacaacaactggggattccggcccaagagactcaacttcaagctctttaacattcaagtcaaagaggtcacgcagaatgacggtacgacgacgattgccaataaccttaccagcacggttcaggtgtttactgactcggagtaccagctcccgtacgtcctcggctcggcgcatcaaggatgcctcccgccgttcccagcagacgtcttcatggtgccacagtatggatacctcaccctgaacaacgggagtcaggcagtaggacgctcttcattttactgcctggagtactttccttctcagatgctgcgtaccggaaacaactttaccttcagctacacctttgaggacgttcctttccacagcagctacgctcacagccagagtttggaccgtctcatgaatcctctcatcgaccagtacctgtattacttgagcagaacaaacactccaagcggaaccaccacgcagtccaggcttcagttttctcaggccggagcaagtgacattcgggaccagtctaggaactggcttcctggaccctgttaccgccagcagcgagtatcaaagacatctgcggataacaacaacagtgaatactcgtggactggagctaccaagtaccacctcaatggcagagactctctggtgaatccgggcccggccatggccagccacaaggacgatgaagaaaagttttttcctcagagcggggttctcatctttgggaagcaaggctcagagaaaacaaatgtggacattgaaaaggtcatgattacagacgaagaggaaatcaggaccaccaatcccgtggctacggagcagtatggttctgtatctaccaacctgcagggcggcaacacacaagcagctaccgcagatgtcaacacacaaggcgttcttccaggcatggtctggcaggacagagacgtgtacctgcaggggcccatctgggcaaagattccacacacggacggacattttcacccctctcccctcatgggcggattcggacttaaacaccctcctccacagattctcatcaagaacaccccggtacctgcgaatccttcgaccaccttcagtgcggcaaagtttgcttctttcatcacacagtattccacggggcaggtcagcgtggagatcgagtgggagctgcagaaggagaacagcaaacgctggaatcccgagatccagtacacttccaactacaacaaatctgttaatgtggactttactgttgacactaatggcgtgtattcagagcctcgccccattggcaccagatacctgactcgtaatctgtaa

SEQ ID NO: 215 - protein, 735 aa, Adeno-associated virus
MAADGYLPDWLEDTLSEGIRQWWKLKPGPPPPKPAERHKDDSRGLVLPGYKYLGPFNGLDKGEPVNEADAAALEHDKAYDRQLDSGDNPYLKYNHADAEFQERLKEDTSFGGNLGRAVFQAKKRVLEPLGLVEEPVKTAPGKKRPVEHSPAEPDSSSGTGKAGQQPARKRLNFGQTGDADSVPDPQPLGQPPAAPSGLGTNTMASGSGAPMADNNEGADGVGNSSGNWHCDSTWMGDRVITTSTRTWALPTYNNHLYKQISSQSGASNDNHYFGYSTPWGYFDFNRFHCHFSPRDWQRLINNNWGFRPKRLNFKLFNIQVKEVTQNDGTTTIANNLTSTVQVFTDSEYQLPYVLGSAHQGCLPPFPADVFMVPQYGYLTLNNGSQAVGRSSFYCLEYFPSQMLRTGNNFTFSYTFEDVPFHSSYAHSQSLDRLMNPLIDQYLYYLSRTNTPSGTTTQSRLQFSQAGASDIRDQSRNWLPGPCYRQQRVSKTSADNNNSEYSWTGATKYHLNGRDSLVNPGPAMASHKDDEEKFFPQSGVLIFGKQGSEKTNVDIEKVMITDEEEIRTTNPVATEQYGSVSTNLQGGNTQAATADVNTQGVLPGMVWQDRDVYLQGPIWAKIPHTDGHFHPSPLMGGFGLKHPPPQILIKNTPVPANPSTTFSAAKFASFITQYSTGQVSVEIEWELQKENSKRWNPEIQYTSNYNKSVNVDFTVDTNGVYSEPRPIGTRYLTRNL

SEQ ID NO: 216 - DNA, 3161 bp, Adeno-associated virus
  source 1..3161: mol_type = unassigned DNA
gattgaatttagcggccgcgaattcgcccttgctgcgtcaactggaccaatgagaactttccattcaatgattgcgtcgacaagatggtgatctggtgggaggagggaaagatgaccgccaaggtcatggagtcggccaaagccattctcggaggaagcaaggtgcgcgtggaccagaaatgtaagtcctcggcccagatagacccgactcccgtgattgtcacctccaacaccaacatgtgcgccgtgattgacgggaactcaacgaccttcgagcaccagcagccgttgcaagaccggatgttcaaatttgaactcacccgccgtctggatcatgactttgggaaggtcaccaagcaggaagtcaaagactttttccggtgggcaaaggatcacgtggttgaggtggagcatgaattctacgtcaaaaagggtggagccaagaaaagacccgcccccagtgacgcagatataagtgagcccaaacgggcgcgcgggtcagttgcgcagccatcgacgtcagacgcggaagcttcgatcaactacgcggacaggtaccaaaacaaatgttctcgtcacgtgggcatgaatctgatgctgtttccctgcagacaatgcgagagaatgaatcaaaattcaaatatctgcttcactcacggacagaaggactgtttagagtgctttcccgtgtcagaatctcaacccgtttctgtcgtcaaaaaggcgtatcagaaactttgctacattcatcatatcatgggaaaggtgccagacgcttgcactgcctgcgatctggtcaatgtggatttggatgactgcatctctgaacaataaatgatttaaatcaggtatggctgccgatggttatcttccagattggctcaaggacactctctctgaaggaataagacagtggtggaagctcaaacctggcccaccaccaccaaagcccgcagagcggcataaggacgacagcgggggtcttgtgcttcctgggtacaagtacctcggacccttcaacggactcgacaagggagagccggtcaacgaggcagacgccgcggccctcgagtacgacaaggcctacgaccggcagctcgacagcggagacaacccgtacctcaagtacaaccacgccgacgcggagtttcaggagcgccttaaagaagatacgtcttttgggggcaacctcggacgagcagtcttccaggcgaaaaagagggttcttgaacctctgggcctggttgaggaacctgttaagacggctccgggaaaaaagaggccggtagagcactctcctgtggagccagactcctcctcgggaacaggaaaagcgggccagcagcctgcgagaaagagattgaattttggtcagactggagacgcagactccgtacctgacccccagcctctcggacagccaccagcagccccctctggtctgggaactaatacgatggctacaggcagtggcgcaccaatggcagacaataacgagggcgccgacggagtgggtaattcctcgggaagttggcattgcgattccacatggatgggcgacagagtcatcaccaccagcacccgaacctgggctctgcccacctacaacaaccatctgtacaagcagatctccagccaatcaggagccagcaacgacaaccactactttggctacagcaccccttgggggtattttgacttcaacagattccactgccacttttcaccacgtgactggcaaagactcatcaacaacaactggggattccggcccaagagactcaacttcaagctctttaacattcaagtcaaggaggtcacgcagaatgacggtacgacgacgattgccaataaccttaccagcacggttcaggtgtttactgactcggagtaccagctcccgtacgtccccggctcggcgcatcaaggatgcctcccgccgttcccagcagacgtcttcatggtgccacagtatggatacctcaccctgaacaacgggagtcaggcagtaggacgctcttcattttactgcctggagtactttccttctcagatgcttcgtaccggaaacaactttaccttcagctacacctttgaggatgttcctttccacagcagctacgctcacagccagagtttggaccgtctcatgaatcctctcatcgaccagtacctgtattacttgagcagaacaaacactccaagcggaaccaccacgcagtccaggcttcagttttctcaggccggagcaagtgacattcgggaccagtctaggaactggcttcctggaccctgttaccgccagcagcgagtatcaaagacagctgcggacaacaacaacagtgaatactcgtggactggagctaccaagtaccacctcaatggcagagactctctggtgaatccgggcccggccatggccagccacaaggacgatgaagaaaagttttttcctcaaagcggggttctcatctttgggaagcaaggctcagagaaaacaaatgtggacattgaaaaggtcatgattacagacgaagaggaaatcagaaccaccaatcccgtggccacggagcagtatggttctgtatctaccaacctccagagcggcaacacacaagcagctactgcagatgtcaacacacaaggcgttcttccaggcatggtctggcaggacagagacgtgcacctgcaggggcctatctgggcaaagattccacacacggacggacattttcacccctctcccctcatgggcggatttggacttaaacaccctcctccacagattctcatcaagaacaccccggtacctgcaaatccttcgaccaccttcagtgcggcaaagtttgcttccttcatcacacagtattccacagggcaggtcagcgtggagatcgagtgggagctgcagaaggagaacagcaaacgctggaaccccgagatccagtacacttccaactacaacaaatctgttaatgtggactttactgtggacactaatggtgtgtattcagagcctcgccccattggcaccagatacctgactcgtaatctgtaattgcttgttaatcaataaaccgtttaattcgtttcagttgaactttggtctctgcgaagggcgaattcgtttaaaccctgcaggactagtccctttagtgagg

SEQ ID NO: 217 - DNA, 3162 bp, Adeno-associated virus
  source 1..3162: mol_type = unassigned DNA
gaattgaatttagcggccgcgaattcgcccttcgcagagaccaaagttcaactgaaacgaattaaacggtttattgattaacaagcaattacagattacgagtcaggtatctggtgccaatggggcgaggctctgaatacacgccattagtgtccacagtaaagtccacattaacagacttgttgtagttggaagtgtactgaatttcgggattccagcgtttgctgttttccttctgcagctcccactcgatctccacgctgacctgtcccgtggagtactgtgtgatgaaggaagcaaactttgccgcactgaaggtggtcgaaggattcgcaggtaccggggtgttcttgatgagaatctgtggaggagggtgtttaagtccgaatccacccatgaggggagaggggtgaaaatgtccgtccgtgtgtggaatctttgcccagatgggcccctgaaggtacacatctctgtcctgccagaccatgcctggaagaacgccttgtgtgttgacatctgcggtagctgcttgtctgttgcctctctggaggttggtagatacagaaccgtactgctccgtagccacgggattggttgtcctgatttcctcttcgtctgtaatcatgaccttttcaatgtccacatttgttttctctgagccttgcttcccaaagatgagaaccccgctctgaggaaaaaacttttcttcattgtccttgtggcttgccatggccgggcccggattcaccagagagtctctgccattgaggtggtacttggtagctccagtccacgagtattcactgttgttgttatccgcagatgtctttgatactcgctgctggcggtaacagggtccaggaagccagttcctagactggtcccgaatgtcactcgctccggcctgagaaaactgaagccttgactgcgtggtggttccacttggagtgtttgttgtgctcaagtaatacaggtactggtcgatgagaggattcatgagacggtccagactctggctgtgagcgtagccgctgtggaaaggaacgtcctcaaaagtgtagctgaaggtaaagttgtttccggtacgcagcatctgagaaggaaagtactccaggcagtaaaatgaagagcgtcctactgcctgactcccgttgttcagggtgaggtatccatactgtggcaccatgaagacgtctgctgggaacggcgggaggcatccttgatgcgccgagccgaggacgtacgggagctggtactccgagtcagtaaacacctgaaccgtgctggtaaggttattggcaatcgtcgtcgtaccgtcattctgcgtgacctctttgacttgaatgttaaagagcttgaagttgagtctcttgggtcggaatccccagttgttgttgatgagtctttgccagtcacgtggtgaaaagtggcagtggaatctgttgaagtcaaaatacccccaaggggtgctgtagccaaagtagtgattgtcgttcgaggctcctgattggctggaaatttgtttgtagaggtggttgttgtaggtgggcagggcccaggttcgggtgctggtggtgatgactctgtcgcccatccatgtggaatcgcaatgccaatttcccgaggaattacccactccgtcggcgccctcgttattgtctgccattggtgcgccactgcctgtagccatcgtattagttcccagaccagagggggctgctggtggctgtccgagaggctgggggtcaggtactgagtctgcgtctccagtctgaccaaaattcaatctttttcttgcaggctgctggcccgcctttccggttcccgaggaggagtctggctccacaggagagtgctctaccggcctcttttttcctggagccgtcttgacaggttccccaaccaggcccagaggttcaagaaccctctttttcgcctggaagactgctcgtccgaggttgcccccaaaagacgtatcttctttaaggcgctcctgaaactccgcgtcggcgtggttgtacttgaggtacgggttgtctccgctgtcgagctgccggtcgtaggctttgtcgtgctcgagggccgcggcgtctgcctcgttgaccggctctcccttgtcgagtccgttgaagggtccgaggtacttgtacccaggaagcacaagacccctgctgtcgtccttatgccgctctgcgggctttggtggtggtgggccaggtttgagcttccaccactgtcttattccttcagagagagtgtcctcgagccaatctggaagataaccatcggcagccatacctgatttaaatcatttattgttcaaagatgcagtcatccaaatccacattgaccagatcgcaggcagtgcaagcgtctggcacctttcccatgatatgatgaatgtagcacagtttctgatacgcctttttgacgacagaaacgggttgagattctgacacgggaaagcactctaaacagtctttctgtccgtgagtgaagcagatatttgaattctgattcattctctcgcattgtctgcagggaaacagcatcagattcatgcccacgtgacgagaacatttgttttggtacctgtctgcgtagttgatcgaagcttccgcgtctgacgtcgatggctgcgcaactgactcgcgcacccgtttgggctcacttatatctgcgtcactgggggcgggtcttttcttggctccaccctttttgacgtagaattcatgctccacctcaaccacgtgatcctttgcccaccggaaaaagtctttgacttcctgcttggtgaccttcccaaagtcatgatccagacggcgggtgagttcaaatttgaacatccggtcttgcaacggctgctggtgttcgaaggtcgttgagttcccgtcaatcacggcgcacatgttggtgttggaggtgacgatcacgggagtcgggtctatctgggccgaggacttgcatttctggtccacgcgcaccttgcttcctccgagaatggctttggccgactccacgaccttggcggtcatcttcccctcctcccaccagatcaccatcttgtcgacacagtcgttgaagggaaagttctcattggtccagttgacgcagcaagggcgaattcgtttaaacctgcaggactagtccctttagtgaggg

SEQ ID NO: 218 - DNA, 3164 bp, Adeno-associated virus
  source 1..3164: mol_type = unassigned DNA
gcgaattgaatttagcggccgcgaattcgcccttcgcagagaccaaagttcaactgaaacgaattaaacggtttattgattaacaagcaattacaaattacgagtcaggtatctggtgccaatggggcgaggctctgaatacacgccattagtgtccacagtaaagtccacattaacagacttgttgtagttggaagtgtactgaatttcgggattccagcgtttgctgttttccttctgcagctcccactcgatctccacgctgacctgtcccgtggagtactgtgtgatgaaggaagcaaactttgccgcactgaaggtggtcgaaggattcgcaggtaccggggtgttcttgatgagaatctgtggaggagggtgtttaggtccgaatccacccatgaggggagaggggtgaaaatgtccgtccgtgtgtggaatctttgcccagatgggcccctgaaggtacacatctctgtcctgccagaccatgcctggaagaacgccttgtgtgttgacatctgcggtagctgcttgtctgttgcctctctggaggttggtagatacagaaccatactgctccgtagccacgggattggttgtcctgatttcctcttcgtctgtaatcatgaccttttcaatgtccacatttgttttctctgagccttgcttcccaaagatgagaaccccgctctgaggaaaaaacttttcttcattgtccttgtggcttgccatggccgggcccggattcaccagagagtctctgccattgaggtggtacttggtagctccagtccacgagtattcactgttgttgttatccgcagatgtctttgatactcgctgctggcggtaacagggtccaggaagccagttcctagactggtcccgaatgtcactcgctccggcctgagaaaactgaagccttgactgcgtggtggttccacttggagtgtttgttgtgctcaagtaatacaggtactggtcgatgagaggattcatgagacggtccagactctggctgtgagcgtagctgctgtggaaaggaacgtcctcaaaagtgtagctgaaggtaaagttgtttccggtacgcagcatctgagaaggaaagtactccgggcagtaaaatgaagagcgtcctactgcctgactcccgttgctcagggtgaggtatccatactgtggcaccatgaagacgtctgctgggaacggcgggaggcatccttgatgcgccgagccgaggacgtacgggagctggtactccgagtcagtaaacacctgaaccgtgctggtaaggttattggcaatcgtcgtcgtaccgtcattctgcgtgacctctttgacttgaatgttaaagagcttgaagttgagtctcttgggtcggaatccccagttgttgttgatgagtctttgccagtcacgtggtgaaaagtggcagtggaatctgttgaagtcaaaatacccccaaggggtgctgtagccaaagtagtgattgtcgttcgaggctcctgattggctggaaatttgtctgtagaggtggttgttgtaggtgggcagggcccaggttcgggtgctggtggtgatgactctgtcgcccatccatgtggaatcgcaatgccgatttcccgaggaattacccactccgtcggcgccctcgttattgtctgccattggtgcgccactgcctgtagccatcgtattagttcccagaccagagggggctgctggtggctgtccgagaggctgggggtcaggtactgagtctgcgtctccagtctgaccaaaattcaatctttttcttgcaggctgctggcccgcctttccggttcccgaggaggagtctggctccacaggagagtgctctaccggcctcttttttcccggagccgtcttaacaggttccccaaccaggcccagaggttcaagaaccctctttttcgcctggaagactgctcgtccgaggttgcccccaaaagacgtatcttctttaaggcgctcctgaaactccgcgtcggcgtggttgtacttgaggtacgggttgtctccgctgtcgagctgccggtcgtaggctttgtcgtgctcgagggccgcggcgtctgcctcgttgaccggctctcccttgtcgagtccgttgaagggtccgaggtacttgtacccaggaagcacaagacccctgctgtcgtccttatgccgctctgcgggctttggtggtggtgggccaggtttgagcttccaccactgtcttattccttcagagagagtgtcctcgagccaatctggaagataaccatcggcagccatacctgatttaaatcatttattgttcaaagatgcagtcatccaaatccacattgaccagatcgcaggcagtgcaagcgtctggcacctttcccatgatatgatgaatgtagcacagtttctgatacgcctttttgacgacagaaacgggttgagattctgacacgggaaagcactctaaacagtctttctgtccgtgagtgaagcagatatttgaattctgattcattctctcgcattgtctgcagggaaacagcatcagattcatgcccacgtgacgagaacatttgttttggtacctgtctgcgtagttgatcgaagcttccgcgtctgacgtcgatggctgcgcaactgactcgcgcacccgtttgggcccacttatatctgcgtcactgggggcgggtcttttcttggctccaccctttttgacgtagaattcatgctccacctcaaccacgtgatcctttgcccaccggaaaaagtctttgacttcctgcttggtgaccttcccaaagtcatgatccagacggcgggtgagttcaaatttgaacatccggtcttgcaacggctgctggtgttcgaaggtcgttgagttcccgtcaatcacggcgcacatgttggtgttggaggtgacgatcacgggagtcgggtctatctgggccgaggacttgcatttctggtccacgcgcaccttgcttcctccgagaatggctttggccgactccacgaccttggcggtcatcttcccctcctcccaccagatcaccatcttgtcgacacagtcgttgaagggaaagttctcattggtccagttgacgcagcaagggcgaattcgtttaaacctgcaggactagtccctttagtgaggg

SEQ ID NO: 219 - DNA, 3163 bp, Adeno-associated virus
  source 1..3163: mol_type = unassigned DNA
accctcactaaagggactagtcctgcaggtttaaacgaattcgcccttgctgcgtcaactggagcaatgagaactttcccttcaacgactgtgtcgacaagatggtgatttggtgggaggaggggaagatgaccgccaaggtcgtggagtcggccaaagccattctcggaggaagcaaggtgcgcgtggaccagaaatgcaagtcctcggcccagatagatccgactcccgtgatcgtcacctccaacaccaacatgtgcgccgtgattgacgggaactcaacgaccttcgaacaccagcagccgttgcaagaccggatgttcaaatttgaactcacccgccgtctggatcatgactttgggaaggtcaccaagcaggaagtcaaagactttttccggtgggcaaaggatcacgtggttgaggtggagcatggattctacgtcaaaaagggtggagccaagaaaagacccgcccctagtgacgcagatataagtgagcccaaacgggtgcgcgagtcagttgcgcagccatcgacgtcggacgcggaagcttcgatcaactacgcggacaggtaccaaaacaaatgttctcgtcacgtgggcatgaatctgatgctgtttccctgcagacaatgcgagagaatgaatcaaaattcaaatatctgcttcactcacggacagaaagactgtttagagtgctttcccgtgtcagaatctcaacctgtttctgtcgtcaaaaaggcgtatcagaaactgcgctacattcatcatatcatgggaaaggtgccagacgcttgcactgcctgcgatctggtcaatgtggatttggatgactgcatctctgaacaataaatgatttaaatcaggtatggctgccgatggttatcttccagattggctcgaggacactctctctgaaggaataagacagtggtggaagctcaaacctggcccaccaccaccaaagcccgcagagcggcataaggacgacagcaggggtcttgtgcttcctgggtacaagtacctcggacccttcaacggactcgacaagggagagccggtcaacgaggcagacgccgcggccctcgagcacgacaaggcctacgaccggcagctcgacagcggagacaacccgtacctcaagtacaaccacgccgacgcggagtttcaggagcgtcttaaagaagatacgtcttttgggggcaacctcggacgagcagtcttccaggcgaaaaagagggttcttgaacctctgggcctggttgaggaacctgttaagacggctccgggaaaaaagaggccggtagagcactctcctgcggagccagactcctcctcgggaaccggaaaagcgggccagcagcctgcaagaaaaagactgaatttcggtcagactggagacgcagactccgtacctgacccccagcctctcggacagccaccagcagcccccacaagtttgggatctactacaatggctacaggcagtggcgcaccaatggcagacaataacgagggtgccgatggagtgggtaattcctcaggaaattggcattgcgattcccaatggctgggcgacagagtcatcaccaccagcacccgaacctgggccctgcccacctacaacaaccacctttacaagcaaatctccagccaatcaggagcctcaaacgacaaccactactttggctacagcaccccctgggggtattttgacttcaacagattccactgccacttttcaccacgtgactggcaaagactcatcaacaacaactggggattccgacccaagagactcaacttcaagctctttaacattcaagtcaaagaggtcacgcagaatgacggtacgacgacgattgccaataaccttaccagcacggttcaggtgtttactgactcggagtaccagctcccgtacgtcctcggctcggcgcatcaaggatgcctcccgccgtttccagcggacgtcttcatggtcccacagtatggatacctcaccctgaacaacgggagtcaggcggtaggacgctcttccttttactgcctggagtgctttccttctcagatgctgcgtactggaaacaactttcagttcagctacacttttgaagacgtgcctttccacagcagctacgctcacagccagagtttggatcggctgatgaatcctctgatcgaccagtacctgtattatctaaacagaacacaaacagctagtggaactcagcagtctcggctactgtttagccaagctggacccacaagcatgtctcttcaagctaaaaactggctgcctggaccgtgttatcgccagcagcgtttgtcaaagcaggcaaacgacaacaacaacagcaactttccctggactggagctaccaagtaccacctcaatggcagagactctttggtgaacccgggcccggccatggccagccacaaggacgatgaagaaaagtttttccccatgcatggaaccctaatatttggtaaagaaggaacaaatgctaccaacgcggaattggaaaatgtcatgattacagatgaagaggaaatcaggaccaccaatcccgtggctacagagcagtacggatatgtgtcaaataatttgcaaaactcaaatactgctgcaagtactgaaactgtgaatcaccaaggagcattacctggtatggtgtggcaggatcgagacgtgtacctgcagggacccatttgggccaagattcctcacaccgatggacactttcatccttctccactgatgggaggttttggactcaaacacccgcctcctcagattatgatcaaaaacactcccgttccagccaatcctcccacaaacttcagttctgccaagtttgcttccttcatcacacagtattccacgggacaggtcagcgtggagatcgagtgggagctgcagaaggagaacagcaaacgctggaatcccgaaattcagtacacttccaactacaacaaatctgttaatgtggactttactgtggacactaatggtgtgtattcagagcctcgccccattggcaccagatacctgactcgtaatctgtaattgcttgttaatcaataaaccgtttaattcgtttcagttgaactttggtctctgcgaagggcgaattcgcggccgctaaattcaattcgcc

SEQ ID NO: 220 - protein, 735 aa, Adeno-associated virus
MAADGYLPDWLEDTLSEGIRQWWKLKPGPPPPKPAERHKDDSRGLVLPGYKYLGPFNGLYKGEPVDEADAAALEHDKAYDRQLDSGDNPYLKYNHADAEFQERLKEDTSFGGNLGRAVFQAKKRVLEPLGLVGEPVKTAPGKKRPVEHSPVEPDSSSGTGKAGNQPARKRLNFGQTGDADSVPDPQPLGQPPAAPSGLGSTTMATGSGAPVADNNEGADGVGNSSGNWHCDSQWLGDRVITTSTRTWALPTYNNHLYKQISSQSGASNDNHYFGYSTPWGYFDFNRFHCHFSPRDRQRLINNNWGFRPKRLNFKLFNIQVKEVTQNDGTTTIANNLTSTVQVFTDSGYQLPYVLGLAHQGCLPPFPADVFMVPQYGYLTLNNGSQAVGRSSFYCLEYFPSQMLRTGNNFQFSYTFEDVPFHSSYAHSQSLDRLMNPLIDQYLYYLNKTQSNSGTLQQSRLLFSQAGPTSMSLQAKNWLPGPCYRQQRLSKQANDNNNSNFPWTAATKYHLNGRDSLVNPGPAMASHKDDEEKFFPMHGTLIFGKQGTNANDADLDNVMITDEEEIRTTNPVATEQYGYVSNNLQNSNTGPTTGTVNHQGALPGMVWQDRDVYLQGPIWAKIPHTDGHFHPSPLMGGFGLKHPPPQIMIKNTPVPANPPTNFSSAKFASFITQYSTGQVSVEIEWELQKEDSKRWNPEIQYTSNYNKPVNVDFTVDTNGVYSEPRPIGTRYLTRNL

SEQ ID NO: 221 - DNA, 2208 bp, Adeno-associated virus
  source 1..2208: mol_type = unassigned DNA
atggctgccgatggttatcttccagattggctcgaggacactctctctgaaggaataagacagtggtggaagctcaaacctggcccaccaccaccaaagcccgcagagcggcataaggacgacagcaggggtcttgtgcttcctgggtacaagtacctcggacccttcaacggactctacaagggagagccggtcgacgaggcagacgccgcggccctcgagcacgacaaggcctacgaccggcagctcgacagcggagacaacccgtacctcaagtacaaccacgccgacgcggagtttcaggagcgccttaaagaagatacgtcttttgggggcaacctcggacgagcagtcttccaggccaaaaagagggttcttgaacctctgggcttggttggggagcctgttaaaacggctccgggaaaaaagaggccggtagagcactctcctgtggagccagactcctcctcgggaaccggaaaagcgggcaaccagcctgcaagaaaaagattgaattttggtcagactggagacgcagactccgtacctgacccccagcctctcggacagccaccagcagccccctctggtctgggatctactacaatggctacaggcagtggcgcaccagtggcagacaataacgagggtgccgatggagtgggtaattcctcaggaaattggcattgcgattcccaatggctgggcgacagagtcatcaccaccagcacccgaacctgggctctgcccacctacaataaccacctctacaagcaaatctccagccaatcaggagcctcaaacgacaaccactactttggctacagcaccccctgggggtattttgacttcaacagattccactgccacttttcaccacgtgaccggcaaagactcatcaacaacaactggggattccgaccaaaaagactcaacttcaagctctttaacattcaagtcaaagaggtcacgcagaatgacggtacgacgacgattgccaataaccttaccagcacggttcaggtgtttactgactcggggtaccagctcccgtacgtcctcggcttggcgcatcaaggatgcctcccgccgttcccagcagacgtcttcatggtgccacagtatggatacctcaccctgaacaacgggagtcaggcggtaggacgctcttccttttactgcctggagtactttccttctcagatgctgcgtactggaaacaactttcagttcagctacacctttgaagacgttcctttccacagcagctacgctcacagccagagtctggatcggctgatgaatcctctgatcgaccagtacctgtattatctgaacaagacacaatcaaatagtggaactcttcagcagtctcggctactgtttagccaagctggacccaccagcatgtctcttcaagctaaaaactggctgcctggaccttgctacagacagcagcgtctgtcaaagcaggcaaacgacaacaacaacagcaactttccctggactgcggctacaaagtatcatctaaatggccgggactcgttggttaatccaggaccagctatggccagccacaaagacgatgaagaaaagtttttccccatgcatggaaccctgatatttggtaaacaaggaacaaatgctaacgacgcggatttggacaatgtcatgattacagatgaagaagaaatccgcaccaccaatcccgtggctacggagcagtacggatatgtgtcaaataatttgcaaaactcaaatactggtccaactactggaactgtcaatcaccaaggagcgttacctggtatggtgtggcaggatcgagacgtgtacctgcagggacccatttgggccaagattcctcacaccgatggacactttcatccttctccacttatgggaggttttggactcaaacacccacctcctcagatcatgattaaaaacactcccgttccagccaatcctcccacaaacttcagttctgccaagtttgcttctttcatcacacagtattccacgggacaagtcagcgtggagatcgagtgggagctgcagaaggaggacagcaaacgctggaaccccgagatccagtacacttccaactataacaaacctgttaatgtggactttactgtggacactaatggtgtgtattcagagcctcgccccattggcaccagatacctgactcgtaatctgtaa

SEQ ID NO: 222 - DNA, 3161 bp, Adeno-associated virus
  source 1..3161: mol_type = unassigned DNA
cgaattgatttagcggccgcgaattcgcccttcgcagagaccaaagttcaactgaaacgaattaaacggtttattgattaacaagcaattacagattacgagtcaggtatctggtgccaatggggcgaggctctgaatacacaccattagtgtccacagtaaagtccacattaacagatttgttgtagttggaagtgtactggatctcgggattccagcgtttgctgttctccttctgtagctcccactcgatctccacgctgacccgccccgtggaatactgtgtgatgaaggaagcaaactttgccgcactgaaggtggtcgaaggattcgcaggtaccggggtgtttttgatgagaatctgtggaggagggtgtttaagtccgaatccgcccatgaggggagaggggtgaaaatgtccgtccgtgtgcggaatctttgcccagataggcccctgcaggtacacgtctctgtcctgccagaccatgcctggaagaacgccttgtgtgttgacatctgcagtagatgcttgtgtgttgccgctctggaggttggtagatacagaaccatactgctccgtggccacgggattggtggttctgatttcctcttcgtctgtaatcatgaccttttcaatgtccacatttgttttctctgatccttgttttccaaagatgagaaccccgctctgaggaaaaaacttttcttcatcgtccttgtggctggccattgccgggcccggattcaccagagagtctctgccattgaggtggtacttggtagctccaatccacgagtattcactgttgttgttgtccgcagatgtctttgatactcgctgctggcggtaacagggtccaggaagccagttcctagactgatcccgaatgtcactcgctccggcctgagaaaactgaagcctggactgcgtggtggttccgcttggagtgtttgttctgctcaagtaatacaggtactggtcgatgagaggattcatgagacggtccaaactctggctgtgagcgtagctgctgtggaaaggaacatcctcaaaggtgtagctgaaggtaaagttgtttccggtacgcagcatctgagaagggaagtactccaggcagtaaaatgaagagcgtcctactgcctgactcccgttgttcagggtgaggtatccatactgtggcaccatgaagacgtctgctgggaacggcgggaggcatccttgatgcgccgagccgaggacgtacgggagctggtactccgagtcagtaaacacctgaaccgtgctggtaaggttattggcaatcgtcgtcgtaccatcattctgcgtgacctctctgacttgaatgttaaagagcttgaagttgagtctcttgggccggaatccccagttgttgttgatgagtctttgccagtcacgtggtgaaaagtggcagtggaatctgttgaagtcaaaatacccccaaggggtgctgtagccaaagtagtggttgtcgttgctggctcctgattggctggaaatctgcttgtacagatggttgttgtaggtgggcagagcccaggttcgggtgctggtggtgatgactctgtcgcccatccatgtggaatcgcaatgccaatttcccgaggaattacccactccgtcggcgccatcgttattgtctgccattggtgcgccactgcctgtagccatcgtattagttcccagaccagagggggctgctggtggctgtccgagaggctgggggtcaggtacggagtctgcgtctccagtctgaccgaaattcaatctctttcttgcaggctggttgcccgcttttccggttcccgaggaggagtctggctccacaggagagtgctctaccggcctcttttttcccggagccgtcttaacaggctcctcaaccaggcccagaggttcaagaaccctcttttttgcctggaagactgctcgtccgaggttgcccccaaaagacgtatcttctttaaggcgctcctgaaactccgcgtcggcgtggtcgtacttgaggtacgggttgtctccgctgtcgagctgccggtcgtaggccttgtcgtgctcgagggccgcggcgtctgcctcgttgaccggctctcccttgtcgagtccgttgaagggtccgaggtacttgtacccaggaagcacaagacccctgctgtcgtccttatgccgctctgcgggctttggtggtggtgggccaggtttgagcttccaccactgtcttattccttcagagagagtgtcctcgagccaatctggaagataaccatcggcagccatacctgatttaaatcatttattgttcagagatgcagtcatccaaatccacattgaccagatcgcaggcagtgcaagcgtctggcacctttcccatgatatgatgaatgtagcaaagtttctgatacgcctttttgacgacagaaacgggttgagattctgacacgggaaagcactctaaacagtctttctgtccgtgagtgaagcagatatttgaattctgattcattctctcgcattgtctgcagggaaacagcatcagattcatgcccacgtgacgagaacatttgttttggtacctgtccgcgtagttgatcgaagcttccgcgtctgacgtcgatggctgcgcaactgactcgcgcgcccgtttgggctcacttatatctgcgtcactgggggcgggtcttttcttggctccaccctttttgacgtagaattcatgctccacctcaaccacgtgatcctttgcccaccggaaaaagtctttcacttcctgcttggtgaccttcccaaagtcatgatccagacggcgggttagttcaaatttgaacatccggtcttgcaacggctgctggtgttcgaaggtcgttgagttcccgtcaatcacggcgcacatgttggtgttggaggtggcgatcacgggagtcgggtctatctgggccgaggacttgcacttttggtccacgcgcaccttgcttcctccgagaatggcttcggccgattccacgaccttggcggtcatctttccctcctcccaccagatcaccatcttgtcgacacagtcgttgaagggaaagttctcattggtccagttgacgcagcaagggcgaattcgtttaaacctgcaggaactagtcccttagtgagg

SEQ ID NO: 223 - protein, 735 aa, Adeno-associated virus
MAADGYLPDWLEDTLSEGIRQWWKLKPGPPPPKPAERHKDDSRGLVLPGYKYLGPFNGLYKGEPVNEADAAALEHDKAYDRQLDSGDNPYLKYNHAGAEFQERLKEDTSFGGNLGRAVFQAKKRVLEPLGLVEEPVKTAPGKKRPVEHSPVEPDSSSGTGKAGNQPARKRLNFGQTGDADSVPDPQPLGQPPAAPSGLGSTTMATGSGAPVADNNEGADGVGNSSGNWHCDSQWLGDRVITTSTRTWALPTYNNHLYKQISSQSGASNDNHYFGYSTPWGYFDFNRFHCHFSPRDWQRLINNNWGFRPKRLNFKLFNIQVKEVTQNDGTTTIANNLTSTVQVFTDSEYQLPYVLGSAHQGCLPPFPADVFMVPQYGYLTLNNGSQAVGRSSFYCLEYFPSQMLRTGNNFQFSYTFEDVPFHSSYAHSQSLDRLMNPLIDQYLYYLNKTQSNSGTLQQSRLLFSQAGPTSMSLQAKNWLPGPCYRQQRLSKQANDNNNSNFPWTAATKYHLNGRDSLVNPGPAMASHKDDEEKFFPMHGTLIFGKQGTNANDADLDNVMITDEEEIRTTNPVATEQYGYVSNNLQDSNTGPTTGTVNHQGALPGMVWQDRDVYLQGPIWAKIPHTDGHFHPSPLMGGFGLKHPPPQIMIKNTPVPANPPTNFSSAKFASFITQYSTGQVSVEIEWELQKENSKRWNPEIQYTSNYNKSVNVDFTVDTNGVYSEPRPIGTRYLTRNL

SEQ ID NO: 224 - DNA, 2208 bp, Adeno-associated virus
  source 1..2208: mol_type = unassigned DNA
atggctgccgatggttatcttccagattggctcgaggacactctctctgaaggaataagacagtggtggaagctcaaacctggcccaccaccgccaaagcccgcagagcggcataaggacgacagcaggggtcttgtgcttcctgggtacaagtacctcggacccttcaacggactctacaagggagagccggtcaacgaggcagacgccgcggccctcgagcacgacaaggcctacgaccggcagctcgacagcggagacaacccgtacctcaagtacaaccacgccggcgcggagtttcaggagcgccttaaagaagatacgtcttttgggggcaacctcggacgagcagtcttccaggccaaaaagagggttcttgaacctctgggcttggttgaggagcctgttaaaacggctccgggaaaaaagaggccggtagagcactctcctgtggagccagactcctcctcgggaaccggaaaagcgggcaaccagcctgcaagaaaaagattgaattttggtcagactggagacgcagactccgtacctgacccccagcctctcggacagccaccagcagccccctctggtctgggatctactacaatggctacaggcagtggcgcaccagtggcagacaataacgagggtgccgatggagtgggtaattcctcaggaaattggcattgcgattcccaatggctgggcgacagagtcatcaccaccagcacccgaacctgggctctgcccacctacaacaaccacctctacaagcaaatctccagccaatcaggagcctcaaacgacaaccactactttggctacagcaccccctgggggtattttgacttcaacagattccactgccacttttcaccacgtgactggcaaagactcatcaacaacaactggggattccgaccaaagagactcaacttcaagctctttaacattcaagtcaaagaggtcacgcagaatgacggtacgacgacgattgccaataaccttaccagcacggttcaggtgtttactgactcggagtaccagctcccgtacgtcctcggctcggcgcatcaaggatgcctcccgccgttcccagcagacgtcttcatggtgccacagtatggatacctcaccctgaacaacgggagtcaggcggtaggacgctcttccttttactgcctggagtactttccttctcagatgctgcgtactggaaacaactttcagttcagctacacctttgaagacgttcctttccacagcagctacgctcacagccagagtctggatcggctgatgaatcctctgatcgaccagtacctgtattatctgaacaagacacaatcaaatagtggaacccttcagcagtctcggctactgtttagccaagctggacccaccagcatgtctcttcaagctaaaaactggctgcctggaccttgctacagacagcagcgtctgtcaaagcaggcaaacgacaacaacaacagcaactttccctggactgcggctacaaagtatcatctaaatggccgggactcgttggttaatccaggaccagctatggccagccacaaagacgatgaagaaaagtttttccccatgcatggaaccctgatatttggtaaacaaggaacaaatgctaacgacgcggatttggacaatgtcatgattacagatgaagaagaaatccgcaccaccaatcccgtggctacggagcagtacggatatgtgtcaaataatttgcaagactcaaatactggtccaactactggaactgtcaatcaccaaggagcgttacctggtatggtgtggcaggatcgagacgtgtacctgcagggacccatttgggccaagattcctcacaccgatggacactttcatccttctccacttatgggaggttttggactcaaacacccacctcctcagatcatgattaaaaacactcccgttccagccaatcctcccacaaacttcagttctgccaagtttgcttctttcatcacacagtattccacgggacaagtcagcgtagagatcgagtgggagctgcagaaggagaacagcaaacgctggaaccccgagatccagtacacttccaactataacaaatctgttaatgtggactttactgtggacactaatggtgtgtattcagagcctcgccccattggcaccagatacctgactcgtaatctgtaa

SEQ ID NO: 225 - protein, 738 aa, Adeno-associated virus
MAADGYLPDWLEDNLSEGIREWWDLKPGAPKPKANQQKQDDGRGLVLPGCKYLGPFNGLDKGEPVNAADAAALEHDKAYDQQLKAGDNPYLRYNHADAEFQERLQEDTSFGGNLGRAVFQAKKRVLEPLGLVEEGAKTAPGKKRPVEPSPQRSPDSSTGIGKTGQQPAKKRLNFGQTGDSESVPDPQPIGEPPAGPSGLGSGTMAAGGGAPMADNNEGADGVGSSSGNWHCDSTWLGDRVITTSTRTWALPTYNNHLYKQISNGTSGGSTNDNTYFGYSTPWGYFDFNRFHCHFSPRDWQRLINNNWGFRPKRLNFKLFNIQVKEVTQNEGTKTIANNLTSTIQVFTDSEYQLPYVLGSAHQGCPPPFPADVFMIPQYGYLTLNNGSQAVGRSSFYCLEYFPSQMRRTGNNFEFSYQFEDVPFHSSYAHSQSLDRLMNPLIDQYLYYLSRTQSTGGTAGTQQLLFSQAGPNNMSAQAKNWLPGPCYRQQRVSTTLSQNNNSNFAWTGATKYHLNGRDSLVNPGVAMATHKDDEERFFPSSGVLMFGKQGAGKDNVDYSSVMLTSEEEIKTTNPVATEQYGVVADNLQQQNAAPIVGAVNSQGALPGMVWQNRDVYLQGPIWAKIPHTDGNFHPSPLMGGFGLKHPPPQILIKNTPVPADPPTTFSQAKLASFITQYSTGQVSVEIEWELQKENSKRWNPEIQYTSNYNKSVNVDFTVDTNGVYSEPRPIGTRYLTRNL

SEQ ID NO: 226 - DNA, 2217 bp, Adeno-associated virus
  source 1..2217: mol_type = unassigned DNA
atggctgccgatggttatcttccagattggctcgaggacaacctctctgagggcattcgcgagtggtgggacttgaaacctggagccccgaaacccaaagccaaccagcaaaagcaggacgacggccggggtctggtgcttcctggctgcaagtacctcggacccttcaacggactcgacaagggggagcccgtcaacgcggcggacgcagcggccctcgagcacgacaaggcctacgaccagcagctcaaagcgggtgacaatccgtacctgcggtataaccacgccgacgccgagtttcaggagcgtctgcaagaagatacgtcttttgggggcaacctcgggcgagcagtcttccaggccaagaagcgggttctcgaacctctcggtctggttgaggaaggcgctaagacggctcctggaaagaagagaccggtagagccatcaccccagcgttctccagactcctctacgggcatcggcaagacaggccagcagcccgcgaaaaagagactcaactttgggcagactggcgactcagagtcagtgcccgaccctcaaccaatcggagaaccccccgcaggcccctctggtctgggatctggtacaatggctgcaggcggtggcgctccaatggcagacaataacgaaggcgccgacggagtgggtagttcctcaggaaattggcattgcgattccacatggctgggcgacagagtcatcaccaccagcacccgaacctgggccctccccacctacaacaaccacctctacaagcaaatctccaacgggacatcgggaggaagcaccaacgacaacacctacttcggctacagcaccccctgggggtattttgactttaacagattccactgccacttctcaccacgtgactggcagcgactcatcaacaacaactggggattccggcccaagagactcaacttcaagctcttcaacatccaggtcaaggaggtcacgcagaatgaaggcaccaagaccatcgccaataaccttaccagcacgattcaggtctttacggactcggaataccagctcccgtacgtcctcggctctgcgcaccagggctgcccgcctccgttcccggcggacgtcttcatgattcctcagtacgggtacctgactctgaacaacggcagtcaggccgtgggccgttcctccttctactgcctggagtactttccttctcaaatgcggagaacgggcaacaactttgagttcagctaccagtttgaggacgtgccttttcacagcagctacgcgcatagccaaagcctggaccggctgatgaaccccctcatcgaccagtacctgtactacctgtctcggactcagtccacgggaggtaccgcaggaactcagcagttgctattttctcaggccgggcctaataacatgtcggctcaggccaaaaactggctacccgggccctgctaccggcagcaacgcgtctccacgacactgtcgcaaaataacaacagcaactttgcttggaccggtgccaccaagtatcatctgaatggcagagactctctggtaaatcccggtgtcgctatggcaacgcacaaggacgacgaagagcgattttttccatccagcggagtcttgatgtttgggaaacagggagctggaaaagacaacgtggactatagcagcgttatgctaaccagtgaggaagaaatcaaaaccaccaacccagtggccacagaacagtacggcgtggtggccgataacctgcaacagcaaaacgccgctcctattgtaggggccgtcaacagtcaaggagccttacctggcatggtctggcagaaccgggacgtgtacctgcagggtcctatctgggccaagattcctcacacggacggcaactttcatccttcgccgctgatgggaggctttggactgaaacacccgcctcctcagatcctgattaagaatacacctgttcccgcggatcctccaactaccttcagtcaagccaagctggcgtcgttcatcacgcagtacagcaccggacaggtcagcgtggaaattgaatgggagctgcagaaagagaacagcaagcgctggaacccagagattcagtatacttccaactataacaaatctgttaatgtggactttactgtggacactaatggtgtgtattcagagcctcgccccattggcaccagatacctgactcgtaatctgtaa

SEQ ID NO: 227 - DNA, 3167 bp, Adeno-associated virus
  source 1..3167: mol_type = unassigned DNA
attgaatttagcggccgcgaattcgcccttcgcagagaccaaagttcaactgaaacgaattaaacggtttattgattaacaagcaattacagattacgagtcaggtacctggtgccaatggggcgaggctctgaatacacaccattagtgtccacagtaaagtccacattaacagatttgttgtagttggaagtgtactgaatctcgggattccagcgtttgctgttctccttctgcagctcccactcgatctccacgctgacctgccccgtggagtactgtgtaatgaaggaagcaaactttgccgcactgaaggtagtcgaaggattcgcaggtaccggggtgttcttgatgagaatctgcgggggagggtgtttaagtccgaatccgcccatgaggggagaggggtgaaaatgtccgtccgtgtgtggaatctttgcccagatgggcccctgcaggtacacgtctctgtcctgccacaccatgcctggaagaacgccttgtgtgttgacatctgaggtagctgcttgtgtgttgccgctctggaggttggtagatacagaaccatactgctccgtagccacgggattggtggtcctgatttcctcttcgtctgtaatcatgaccttttcaatgtccacattagtttttcccgagtcttgttttccaaagatgagaaccccgctctgaggaaaaaacttttcttcatcgtccttgtggctggccatggccgggcccggattcaccagagagtctcttccattaaggtggtacttggtagctccagtccacgagtattcactgttgttgttatccgcagatgtctttgatactcgctgctggcggtaacagggtccaggaagccagttcctagactggtcccgaatgtcacttgctccggcctgagaaaactgaagccttgactgcgtggtggttccgcttggagtgtttgttctgctcaagtaatacaggtactggtcgatgagaggattcatgagacggtccaaactctggctgtgggcgtagctgctgtggaaaggaacgtcctcaaaggtgtagctgaaggtaaagttgtttccggtacgcagcatctgagaaggaaagtactccaggcagtaaaatgaagagcgtcctactgcctgactcccgttgttcagggtgaggtatccatactgtggcaccatgaagacgtctgctgggaacggcgggaggcatccttgatgcgccgagccgaggacgtacgggagctggtactccgagtcagtaaacacctgaaccgtgctggtaaggttattggcaatcgtcgtcgtaccgtcattctgcgtgacctccttgacttgaatgttaaagagcttgaagttgagtcttttgggccggaatccccaattgttgttgatgagtctttgccagtcacgtggcgaaaagtggcagtggaatctgttgaagtcaaaatacccccaaggggtgctgtagccaaagtagtggttgtcgtttgaggctcctgattggctggaaatctgcttgtagaggtggttgttgtaggtgggcagagcccaggtgcgggtgctggtggtgatgactctgtcgcccatccatgtggaatcgcaatgccaatttcccgaggaattacccactccgtcggcgccctcgttattgtctgccattggtgcgccactgcctgtagccatcgtattagttcccagaccagagggggctgctggtggctgtccgagaggctgggggtcaggtacggagtctgcgtctccagtctgaccgaaattcaatctctttcttgcaggctgctggcccgcttttccggttcccgaggaggagtctggctccgcaggagagtgctctaccggcctcttttttcccggagccgtcttaacaggttcctcaaccaggcccagaggttcaagaaccctctttttcgcctggaagactgctcgtccgaggttgcccccaaaagacgtatcttctttaagacgctcctggaactccgcgtcggcgtggttgtacttggggtacgggttgtctccgctgtcgagctgccggtcgtaggccttgtcgtgctcgagggccgcggcgtctgcctcgttgaccggctctcccttgtcgagtccgttgaagggtccaaggtacttgtacccaggaagcacaagacccctgctgtcgtccttatgccgctctgcgggctttggtggtggtgggccaggtttgagcttccaccactgtcttattccttcagagagagtgtcctcgagccaatctggaagataaccatcggcagccatacctgatttaaatcatttattgttcagagatgcagtcatccaaatccacattgaccagatcgcaagcagtgcaagcgtctggcacctttcccatgatatgatgaatgtagcacagtttctgatacgcctttttgacgacagaaacgggttgagattctgacacgggaaagcactctaaacagtctttctgtccgtgagtgaagcagatatttgaattctgattcattctctcgcattgtctgcagggaaacagcatcagattcatgcccacgtgacgagaacatttgttttggtacctgtccgcgtagttgattgaagcttccgcgtctgacgtcgatggctgcgcaactgactcgcgcgcccgtttgggctcacttatatctgcgtcactgggggcgggtctttttttggctccaccctttttgacgtagaattcatgctctacctcaaccacgtgatcctttgcccaccggaaaaagtctttgacttcctgcttggtgaccttcccaaagtcatgatccagacggcgggtgagttcaaatttgaacatccggtcttgcaacggctgctggtgttcgaaggtcgttgagttcccgtcaatcactgcgcacatgttggtgttggaggtgacaatcacgggagtcgggtctatctgggccgaggacttgcatttctggtccacgcgcaccttgcttcctccgagaatggctttggccgactccacgaccttggcggtcatcttcccctcctcccaccagatcaccatcttgtcgacgcaatcattgaaaggaaagttctcattggtccagttgacgcagccgtagaaagggcgaattcgtttaaacctgcaggactagtccctttagtgagggt

SEQ ID NO: 228 - DNA, 3161 bp, Adeno-associated virus
  source 1..3161: mol_type = unassigned DNA
aattgaatttagcggccgcgaattcgcccttcgcagagaccaaagttcaactgaaacgaattaaacggtttattgattaacaagcaattacagattacgagtcaggtatctggtgccaatggggcgaggctctgaatacacaccattagtgtccacagtaaagtccacattaacagatttgttgtagttggaagtgtactgaatctcgggattccagcgtttgctgttctccttctgcagctcccactcgatctccacgctgacctgccccgtggagtactgtgtaatgaaggaagcaaactttgccgcactgaaggtagtcgaaggattcgcaggtaccggggtgttcttgatgagaatctgcgggggagggtgtttaagtccgaatccgcccatgaggggagaggggtgaaaatgtccgtccgtgtgtggaatctttgcccagatgggcccctgcaggtacacgtctctgtcctgccacaccatgcctggaagaacgccttgtgtgttgacatctgaggtagctgcttgtgtgttgccgctctggaggttggtagatacagaaccatactgctccgtagccacgggattggtggtcctgatttcctcttcgtctgtaatcatgaccttttcaatgtccacattagtttttcccgagtcttgttttccaaagatgagaaccccgctctgaggaaaaaacttttcttcatcgtccttgtggctggccatggccgggcccggattcaccagagagtctcttccattaaggtggtacttggtagctccagtccacgagtattcactgttgttgttatccgcagatgtctttgatactcgctgctggcggtaacagggtccaggaagccagttcctagactggtcccgaatgtcacttgctccggcctgagaaaactgaagccttgactgcgtggtggttccgcttggagtgtttgttctgctcaagtaatacaggtactggtcgacgagaggattcatgagacggtccaaactctggctgtgggcgtagctgctgtggaaaggaacgtcctcaaaggtgtagctgaaggtaaagttgtttccggtacgcagcatctgagaaggaaagtactccaggcagtaaaatgaagagcgtcctactgcctgactcccgttgttcagggtgaggtatccatactgtggcaccatgaagacgtctgctgggaacggcgggaggcatccttgatgcgccgagccgaggacgtacgggagctggtactccgagtcagtaaacacctgaaccgtgctggtaaggttattggcaatcgtcgtcgtaccgtcattctgcgtgacctccttgacttgaatgttaaagagcttgaagttgagtcttttgggccgggatccccaattgttgttgatgagtctttgccagtcacgtggcgaaaagtggcagtggaatctgttgaagtcaaaatacccccaaggggtgctgtagccaaagtagtggttgtcgtttgaggctcctgattggctggaaatctgcctgtagaggtggttgttgtaggtgggcagagcccaggtgcgggtgctggtggtgatgactctgtcgcccatccatgtggaatcgcaatgccaatttcccgaggaattacccactccgtcggcgccctcgttattgtctgccattggtgcgccactgcctgtagccatcgtattagttcccagaccagagggggctgctggtggctgtccgagaggctgggggtcaggtacggagtctgcgtctccagtctgaccgaaattcaatctccttcttgcaggctgctggcccgcttttccggttcccgaggaggagtctggctccgcaagagagtgctctaccggcctcttttttcccggagccgtcttaacaggttcctcaaccaggcccagaggttcaagaaccctctttttcgcctggaagactgctcgtccgaggttgcccccaaaagacgtatcttctttaagacgctcctggaactccgcgtcggcgtggttgtacttgaggtacgggttgtctccgccgtcgagctgccggtcgtaggccttgtcgtgctcgagggccgcggcgtctgcctcgttgaccggctctcccttgtcgagtccgttgaagggtccaaggtacttgtacccaggaagcacaagacccctgctgtcgtccttatgccgctctgcgggctttggtggtggtgggccaggtttgagcttccaccactgtcttattccttcagagagagtgtcctcgagccaatctggaagataaccatcggcagccatacctgatttaaatcatttattgttcagagatgcagtcatccaaatccacattgaccagatcgcaagcagtgcaagcgtctggcacctttcccatgatatgatgaatgtagcacagtttctgatacgcctttttgacgacagaaacgggttgagattctgacacgggaaagcactctaaacagtctttctgtccgtgagtgaagcagatatttgaattctgattcattctctcgcattgtctgcagggaaacagcatcagattcatgcccacgtgacgagaacatttgttttggtacctgtccgcgtagttgattgaagcttccgcgtctgacgtcgatggctgcgcaactgactcgcgcgcccgtttgggctcacttatatctgcgtcactgggggcgggtctttttttggctccaccctttttgacgtagaattcatgctctacctcaaccacgtgatcctttgcccaccggaaaaagtctttgacttcctgcttggtgaccttcccaaagtcatgatccagacggcgggtgagttcaaatttgaacatccggtcttgcaacggctgctggtgttcgaaggtcgttgagttcccgtcaatcactgcgcacatgttggtgttggaggtgacaatcacgggagtcgggtctatctgggccgaggacttgcatttctggtccacgcgcaccttgcttcctccgagaatggctttggccgactccacgaccttggcggtcatcttcccctcctcccaccagatcaccatcttgtcgacgcaatcattgaaaggaaagttctcattggtccagttgacgcagcaagggcgaattcgtttaaacctgcaggactagtccctttagtgaggg

SEQ ID NO: 229 - DNA, 3172 bp, Adeno-associated virus
  source 1..3172: mol_type = unassigned DNA
gattgaatttagcggccgcgaattcgcccttgctgcgtcaactggaccaatgagaactttcccttcaacgattgcgtcgacaagatggtgatctggtgggaggagggcaagatgaccgccaaggtcgtggagtccgccaaggccattctgggtggaagcaaggtgcgcgtggaccaaaagtgcaagtcatcggcccagatcgaccccacgcccgtgatcgtcacctccaacaccaacatgtgcgccgtgatcgacgggaacagcaccaccttcgagcaccagcagcccctgcaggaccgcatgttcaagttcgagctcacccgccgtctggagcacgactttggcaaggtgaccaagcaggaagtcaaagagttcttccgctgggctcaggatcacgtgactgaggtggcgcatgagttctacgtcagaaagggcggagccaccaaaagacccgcccccagtgacgcggatataagcgagcccaagcgggcctgcccctcagttgcggagccatcgacgtcagacgcggaagcaccggtggactttgcggacaggtaccaaaacaaatgttctcgtcacgcgggcatgcttcagatgctgtttccctgcaagacatgcgagagaatgaatcagaatttcaacgtctgcttcacgcacggggtcagagactgctcagagtgcttccccggcgcgtcggaatctcaacccgtcgtcagaaaaaagacgtatcagaaactgtgcgcgattcatcatctgctggggcgggcacccgagattgcgtgttcggcctgcgatctcgtcaacgtggacttggatgactgtgtttctgagcaataaatgacttaaaccaggtatggctgctgacggttatcttccagattggctcgaggacaacctctctgagggcattcgcgagtggtgggacctgaaacctggagcccccaagcccaaggccaaccagcagaagcaggacgacggccggggtctggtgcttcctggctacaagtacctcggacccttcaacggactcgacaagggggagcccgtcaacgcggcggacgcagcggccctcgagcacgacaaggcctacgaccagcagctcaaagcgggtgacaatccgtacctgcggtataaccacgccgacgccgagtttcaggagcgtctgcaagaagatacgtcttttgggggcaacctcgggcgagcagtcttccaggccaagaagcgggttctcgaacctctcggtctggttgaggaagctgctaagacggctcctggaaagaagagaccggtagaaccgtcacctcagcgttcccccgactcctccgcgggcatcggcaagaaaggccagcagcccgctaaaaagagactgaactttggtcagactggcgactcagagtcagtccccgaccctcaaccaatcggagaaccaccagcaggcccctctggtctgggatctggtacaatggctgcaggcggtggcgctccaatggcagacaataacgaaggcgccgacggagtgggtagttcctcaggaaattggcattgcgattccacatggctgggcgacagagtcatcaccaccagcacccgaacctgggccctgcccacctacaacaaccacctctacaagcaaatatccaatgggacatcgggaggaagcaccaacgacaacacctacttcggctacagcaccccctgggggtattttgacttcaacagattccactgccacttctcaccacgtgactggcagcgactcatcaacaacaactggggattccggccaaaaagactcagcttcaagctcttcaacatccaggtcaaggaggtcacgcagaatgaaggcaccgagaccatcgccaataaccttaccagcacgattcaggtatttacggactcggaataccagctgccgtacgtcctcggctccgcgcaccagggctgcctgcctccgttcccggcggacgtcttcatgattccccagtacggctaccttacactgaacaatggaagtcaagccgtaggccgttcctccttctactgcctggaatattttccatctcaaatgctgcgaactggaaacaattttgaattcagctacaccttcgaggacgtgcctttccacagcagctgcgcacacagccagagctcggaccgactgatgaatcctctcatcgaccagtacctgtactacttatccagaactcggtccacaggaggaactcaaggtacccagcaattgttattttctcaagctgggcctgcaaacatgtcggctcaggctaagaactggctacctggaccttgctaccggcagcagcgagtctctacgacactgtcgcaaaacaacaacagcaactttgcttggactggtgccaccaaatatcacctgaacggaagagactctttggtaaatcccggtgtcgccatggcaacccacaaggacgacgaggaacgcttcttcccgtcgagtggagtcctgatgtttggaaaacagggtgctggaagagacaatgtggactacagcagcgttatgctaaccagcgaagaagaaattaaaaccactaaccctgtagccacagaacaatacggtgtggtggctgacaacttgcagcaaaccaatacagggcctattgtgggaaatgtcaacagccaaggagccttacctggcatggtctggcagaaccgagacgtgtacctgcagggtcccatctgggccaagattcctcacacggacggcaacttccacccttcaccgctaatgggaggatttggactgaagcacccacctcctcagatcctgatcaagaacacgccggtacctgcggatcctccaacaacgttcagccaggcgaaattggcttccttcattacgcagtacagcaccggacaggtcagcgtggaaatcgagtgggagctgcagaaggagaacagcaaacgctggaacccagagattcagtacacttcaaactactacaaatctacaaatgtggactttgctgtcaatacagagggaacttattctgagcctcgccccattggtactcgttacctcacccgtaatctgtaattgctggttaatcaataaaccgtttgattcgtttcagttgaactttggtctctgcgaagggcgaattcgtttaaacctgcaggactagtccctttagtgagg

SEQ ID NO: 230 - DNA, 3172 bp, Adeno-associated virus
  source 1..3172: mol_type = unassigned DNA
gattgaatttagcggccgcgaattcgcccttgctgcgtcaactggaccaatgagaactttcccttcaacgattgcgtcgacaagatggtgatctggtgggaggagggcaagatgaccgccaaggtcgtggagtccgccaaggccattctgggtggaagcaaggtgcgcgtggaccaaaagtgcaagtcatcggcccagatcgaccccacgcccgtgatcgtcacctccaacaccaacatgtgcgccgtgatcggcgggaacagcaccaccttcgagcaccagcagcccctgcaggaccgcatgttcaagttcgagctcacccgccgtctggagcacgactttggcaaggtgaccaagcaggaagtcaaagagttcttccgctgggctcaggatcacgtgactgaggtggcgcatgagttctacgtcagaaagggcggagccaccaaaagacccgcccccagtgacgcggatataagcgagcccaagcgggcctgcccctcagttgcggagccatcgacgtcagacgcggaagcaccggtggactttgcggacaggtaccaaaacaaatgttctcgtcacgcgggcatgcttcagatgctgtttccctgcaagacatgcgagagaatgaatcagaatttcaacgtctgcttcacgcacggggtcagagactgctcagagtgcctccccggcgcgtcagaatctcaacccgtcgtcagaaaaaagacgtatcagaaactgtgcgcgattcatcatctgctggggcgggcacccgagattgcgtgttcggcctgcgatctcgtcaacgtggacttggatgactgtgtttctgagcaataaatgacttaaaccaggtatggctgctgacggttatcttccagattggctcgaggacaacctctctgagggcattcgcgagtggtgggacctgaaacctggagcccccaagcccaaggccaaccagcagaagcaggacgacggccggggtctggtgcttcttggctacaagtacctcggacccttcaacggactcgacaagggggagcccgtcaatgcggcggacgcagcggccctcgagcacgacaaggcctacgaccagcagctcaaagcgggtgacaatccgtacctgcggtataaccacgccgacgccgagtttcaggagcgtctgcaagaagatacgtcttttgggggcaacctcgggcgagcagtcttccaggccaagaagcgggttctcgaacctctcggtctggttgaggaagctgctaagacggctcctggaaagaagagaccggtagaaccgtcacctcagcgttcccccgactcctccacgggcatcggcaagaaaggccagcagcccgctaaaaagagactgaactttggtcagactggcgactcagagtcagtccccgaccctcaaccaatcggagaaccaccagcaggcccctctggtctgggatctggtacaatggctgcaggcggtggcgctccaatggcagacaataacgaaggcgccgacggagtgggtagttcctcaggaaattggcattgcgattccacatggctgggcgacagagtcatcaccaccagcacccgaacctgggccctgcccacctacaacaaccacctctacaagcaaatatccaatgggacatcgggaggaagcaccaacgacaacacctacttcggctacagcaccccctgggggtattttgacttcaacagattccactgccacttctcaccacgtgactggcagcgactcatcaacaacaactggggattccggccaaaaagactcagcttcaagctcttcaacatccaggtcaaggaggtcacgcagaatgaaggcaccaagaccatcgccaataaccttaccagcacgattcaggtatttacggactcggaataccagctgccgtacgtcctcggctccgcgcaccagggctgcctgcctccgttcccggcggacgtcttcatgattccccagtacggctaccttacactgaacaatggaagtcaagccgtaggccgttcctccttctactgcctggaatattttccatctcaaatgctgcgaactggaaacaattttgaattcagctacaccttcgaggacgtgcctttccacagcggctacgcacacagccagagcttggaccgactgatgaatcctctcatcgaccagtacctgtactacttatccagaactcagtccacaggaggaactcaaggtacccagcaattgttattttctcaagctgggcctgcaaacatgtcggctcaggctaagaactggctacctggaccttgctaccggcagcagcgagtctctacgacactgtcgcaaaacaacaacagcaactttgcttggactggtgccaccaaatatcacctgaacggaagagactctttggtaaatcccggtgtcgccatggcaacccacaaggacgacgaggaacgcttcttcccgtcgagtggagtcctgatgtttggaaaacagggtgctggaagagacaatgtggactacagcagcgttatgctaaccagcgaagaagaaattaaaaccactaaccctgtagccacagaacaatacggtgtggtggctgacaacttgcagcaaaccaatacagggcctattgtgggaaatgtcaacagccaaggagccttacctggcatggtctggcagaaccgagacgtgtacctgcagggtcccatctgggccaagattcctcacacggacggcaacttccacccttcaccgctaatgggaggatttggactgaagcacccacctcctcagatcctgatcaagaacacgccggtacctgcggatcctccaacgacgttcagccaggcgaaattggcttccttcattacgcagtacagcaccggacaggtcagcgtggaaatcgagtgggagctgcagaaggagaacagcaaacgctggaacccagagattcagtacacttcaaactactacaaatctacaaatgtggactttgctgtcaatacagagggaacttattctgagcctcgccccattggtactcgttacctcacccgtaatctgtaattgctggttaatcaataaaccgtttgattcgtttcagttgaactttggtctctgcgaagggcgaattcgtttaaacctgcaggactagtccctttagtgagg

SEQ ID NO: 231 - DNA, 2208 bp, Adeno-associated virus
  source 1..2208: mol_type = unassigned DNA
atggctgccgatggttatcttccagattggctcgaggacactctctctgaaggaataagacagtggtggaagctcaaacctggcccaccaccaccaaagcccgcagagcggcataaggacgacagcaggggtcttgtgcttcctgggtacaagtacctcggacccttcaacggactcgacaagggagagccggtcaacgaggcagacgccgcggccctcgagcacgacaaggcctacgaccggcagctcgaaagcggagacaacccgtacctcaagtacaaccacgccgacgcggagtttcaggagcgtcttaaagaagatacgtcttttgggggcaacctcggacgagcagtcttccaggcgaaaaagagggttcttgaacctctgggcctggttgaggagcctgttaaaacggctccgggaaaaaagaggccggtagagcactctcctgtggagccagactcctcctcgggaaccggaaaagcgggccagcagcctgcgagaaaaagattgaattttggtcagactggagacgcagactccgtacctgacccccagcctctcggacagccaccagcagccccctctggtctgggatctactacaatggcttcaggcagtggcgcaccagtggcagacaataacgagggtgccgatggagtgggtaattcctcaggaaattggcattgcgattcccaatggctgggcgacagagtcatcaccaccagcacccgaacctgggccctgcccacctacaacaaccacctctacaagcaaatctccagccaatcaggagcctcaaacgacaaccactactttggctacagcaccccctgggggtattttgacttcaacagattccactgccacttttcaccacgtgactggcaaagactcatcaacaacagctggggattccgacccaaaagactcaacttcaagctctttaacattcaagtcaaagaggtcacgcagaatgacggtacgacgacgattgccaataaccttaccagcacggttcaagtgtttaccgactcggagtaccagctcccgtacgtcctcggctcggcgcatcaaggatgcctcccgccgttcccagcagacgtctttatggtcccacagtatggatacctcaccctgaacaacgggagtcaggcggtaggacgctcttccttttactgcctggagtactttccttctcagatgctgcgtactggaaacaactttcagttcagctacacctttgaagacgttcccttccacagcagctacgctcacagccagagtctggatcggctgctgaatcctctgatcgaccagtacctatattatctgaacaagacacaatcaaatagtggaactcttcagcagtctcggctactgtttagccaagctggacccaccagcatgtctcttcaagctaaaaactggctgcctggaccttgctacagacagcagcgtctgtcaaagcaggcaaacgacaacaacaacagcaactttccctggactgcggctacaaagtatcatctaaatggccgggactcgttggttaatccaggaccagctatggccagccacaaagacgatgaagaaaagtttttccccatgcatggaaccctgatatttggtaaacaaggaacaaatgctaacgacgcggatttggacaatgtcatgattacagatgaagaagaaatccgcaccaccaatcccgtggctacggagcagtacggatatgtgtcaaataatttgcaaaactcaaatactggtccaactactggaactgtcaatcaccaaggagcgttacctggtatggtgtggcaggatcgagacgtgtacctgcagggacccatttgggccaagattcctcacacggacgggcactttcatccttctccactaatgggaggttttgggctcaaacacccgcctcctcagatcatgatcaaaaacactcccgttccagccaatcctcctacaaacttcagttcttccaagtttgcttctttcatcacacagtattccacggggcaggtcagcgtggagatcgagtgggagctgcagaaggagaacagcaaacgctggaatcccgaaattcagtatacttccaactacaacaaatctgttaatgtggactttactgtggacactaatggtgtgtattcagagcctcgccccattggcaccagatacccgactcgtaatctgtaa

SEQ ID NO: 232 - protein, 735 aa, Adeno-associated virus
MAADGYLPDWLEDTLSEGIRQWWKLKPGPPPPKPAERHKDDSRGLVLPGYKYLGPFNGLDKGEPVNEADAAALEHDKAYDRQLESGDNPYLKYNHADAEFQERLKEDTSFGGNLGRAVFQAKKRVLEPLGLVEEPVKTAPGKKRPVEHSPVEPDSSSGTGKAGQQPARKRLNFGQTGDADSVPDPQPLGQPPAAPSGLGSTTMASGSGAPVADNNEGADGVGNSSGNWHCDSQWLGDRVITTSTRTWALPTYNNHLYKQISSQSGASNDNHYFGYSTPWGYFDFNRFHCHFSPRDWQRLINNSWGFRPKRLNFKLFNIQVKEVTQNDGTTTIANNLTSTVQVFTDSEYQLPYVLGSAHQGCLPPFPADVFMVPQYGYLTLNNGSQAVGRSSFYCLEYFPSQMLRTGNNFQFSYTFEDVPFHSSYAHSQSLDRLLNPLIDQYLYYLNKTQSNSGTLQQSRLLFSQAGPTSMSLQAKNWLPGPCYRQQRLSKQANDNNNSNFPWTAATKYHLNGRDSLVNPGPAMASHKDDEEKFFPMHGTLIFGKQGTNANDADLDNVMITDEEEIRTTNPVATEQYGYVSNNLQNSNTGPTTGTVNHQGALPGMVWQDRDVYLQGPIWAKIPHTDGHFHPSPLMGGFGLKHPPPQIMIKNTPVPANPPTNFSSSKFASFITQYSTGQVSVEIEWELQKENSKRWNPEIQYTSNYNKSVNVDFTVDTNGVYSEPRPIGTRYPTRNL

SEQ ID NO: 233 - DNA, 2208 bp, Adeno-associated virus
  source 1..2208: mol_type = unassigned DNA
atggctgccgatggttatcttccagattggctcgaggacactctctctgaaggaataagacagtggtggaagctcaaacctggcccaccaccaccaaagcccgcagagcggcataaggacgacagcaggggtcttgtgcttcctgggtacaagtacctcggacccttcaacggactcgacaagggagagccggtcaacgaggcagacgccgcggccctcgagcacgacaaggcctacgaccggcagctcgacagcggagacaacccgtacctcaagtacaaccacgccgacgcggagtttcaggagcgtcttaaagaagatacgtcttttgggggcaacctcggacgagcagtcttccaggccaaaaagaggattcttgaacctctgggcctggttgaggaacctgttaagacggctccgggagaaaagaggccggtagagcactctcctgcggagccagactcctcctcgggaaccggaaaagcgggccagcagcctgcaagaaagagattgaattttggccagactggagacgcagactcagtacctgacccccagcctctcggacagccaccagcagccccctctggtctgggaactaatacgatggcttcaggcagtggcgcaccaatggcagacaataacgagggcgccgacggagtgggtaattcctcgggaaattggtattgcgattccacatggatgggcgacagagtcatcaccaccagcacccgcacctgggccctgcccacctacaacaaccatctgtacaagcaaatctccagccagtctggagccagcaacgacaaccactactttggctacagcaccccctgggggtattttgacttcaacagattccactgccacttctccccacgtgactggcaaagactcatcaacaacaactggggattccggcccaagagactcagcttcaagctctttaacattcaagtcaaagaggtcacgcagaatgacggtacgacgacgattgccaataaccttaccagcacggttcaggtgtttactgactcggagtaccagctcccgtacgtcctcggctcggcgcatcaaggatgcctcccgccgttcccagcagacgtcttcatggtgccacagtatggatacctcaccctgaacaacggcagtcaggcggtaggacgctcttccttttactgcctggagtactttccttctcagatgcttcgtaccggaaacaactttaccttcagctacacctttgaagacgttcctttccatagcagctacgctcacagccaaagtctggaccgtctcatgaatcctctcatcgaccagtacctgtattacttgagcagaacaaacactccaagcggaaccaccacgatgtccaggcttcagttttctcaggccggagcaagtgacattcgggaccagtctagaaactggcttcctggaccctgttaccgccagcagcgagtatcaaagacagctgcggacaacaacaacagtgattactcgtggactggagctaccaagtaccacctcaatggaagagactctctggtgaatccgggcccagctatggccagccacaaggacgatgaagaaaaatattttcctcagagcggggttctcatctttggaaaacaagactcgggaaaaactaatgtggacattgaaaaggttatgattacagacgaagaggaaatcaggaccaccaatcccgtggctacggagcagtatggttctgtatctaccaacctccagagcggcaacacacaagcagctacctcagatgtcaacacacaaggcgttcttccaggcatggtctggcaggacagagacgtgtacctgcaggggcccatctgggcaaagattccacacacggacggacattttcacccctctcccctcgtgggcggattcggacttaaacaccctcctccacaaattctcatcaagaacaccccggtacctgcgaatccttcgaccactttcagtgcggcaaagtttgcttccttcatcacacagtactccacggggcaggtcagcgtggagatcgagtgggagctgcagaaggagaacagcaaacgctggaatcccgaaattcagtacacttccaactacaacaaatctgttaatgtggactttactgtggacactaatggtgtgtattcagagcctcgccccattggcaccagatacctgactcgtaatctgtaa

SEQ ID NO: 234 - protein, 735 aa, Adeno-associated virus
MAADGYLPDWLEDTLSEGIRQWWKLKPGPPPPKPAERHKDDSRGLVLPGYKYLGPFNGLDKGEPVNEADAAALEHDKAYDRQLDSGDNPYLKYNHADAEFQERLKEDTSFGGNLGRAVFQAKKRILEPLGLVEEPVKTAPGEKRPVEHSPAEPDSSSGTGKAGQQPARKRLNFGQTGDADSVPDPQPLGQPPAAPSGLGTNTMASGSGAPMADNNEGADGVGNSSGNWYCDSTWMGDRVITTSTRTWALPTYNNHLYKQISSQSGASNDNHYFGYSTPWGYFDFNRFHCHFSPRDWQRLINNNWGFRPKRLSFKLFNIQVKEVTQNDGTTTIANNLTSTVQVFTDSEYQLPYVLGSAHQGCLPPFPADVFMVPQYGYLTLNNGSQAVGRSSFYCLEYFPSQMLRTGNNFTFSYTFEDVPFHSSYAHSQSLDRLMNPLIDQYLYYLSRTNTPSGTTTMSRLQFSQAGASDIRDQSRNWLPGPCYRQQRVSKTAADNNNSDYSWTGATKYHLNGRDSLVNPGPAMASHKDDEEKYFPQSGVLIFGKQDSGKTNVDIEKVMITDEEEIRTTNPVATEQYGSVSTNLQSGNTQAATSDVNTQGVLPGMVWQDRDVYLQGPIWAKIPHTDGHFHPSPLVGGFGLKHPPPQILIKNTPVPANPSTTFSAAKFASFITQYSTGQVSVEIEWELQKENSKRWNPEIQYTSNYNKSVNVDFTVDTNGVYSEPRPIGTRYLTRNL

SEQ ID NO: 235 - DNA, 2209 bp, Adeno-associated virus
  source 1..2209: mol_type = unassigned DNA
atggctgccgatggttatcctccagattggctcgaggacactctctctgaagggataagacagtggtggaagctcaaacctggcccaccaccaccaaagcccgcagagcggcataaggacgacagcaggggtcttgtgcttcctgggtacaagtacctcggacccttcaacggactcgacaagggggagccggtcaacgaggcagacgccgcggccctcgagcacgacaaggcctacgaccggcagctcgacagcggagacaacccgtacctcaagtacaaccacgccgacgcagagtttcaggagcgccttaaagaagatacgtcttttgggggcaacctcggacgagcagtcttccaggcgaaaaagagggttcttgaacctctgggcctggttgaggaacctgttaagacggctccgggaaaaaagaggccggtagagcactctcctgtggagccagactcctcctcgggaaccggaaaagcgggccagcggcctgcaagaaaaagattaaattttggtcagactggagacgcagactccgtacctgacccccagcctctcggacagccaccagcagccccctctggtctgggatctactacaatggctacaggcagtggcgcaccaatggcagacaataacgagggtgccgatggagtgggtaattcctcaggaaattggcattgcgattcccaatggctgggcgacagagtcatcaccaccagcacccgaacctgggccctgcccacatacaacaaccacctctacaagcaaatctccagccaatcaggagccagcaacgacaaccactactttggctacagcaccccctgggggtattttgacttcaacagattccactgccacttttcaccacgtgactggcaaagactcatcaacaacaactggggattccggcccaaaagactcaacttcaagctctttaatattcaagtcaaagaggtcacgcagaatgacggtacgacgacgattgccaataaccttaccagcacggttcaggtgtttactgactcggagtaccagctcccgtacgtcctgggctcggcgcatcaaggatgcctcccgccgtttccagcggacgtcttcatggtcccacagtatggatacctcaccctgaacaacgggagtcaggcggtaggacgctcttccttttactgcctggagtactttccttctcagatgctgcgtactggaaacaactttcagttcagctacacttttgaagacgtgcctttccacagcagctacgctcacagccagagtctggatcggctgatgaatcctctgatcgaccagtacctgtattatctgaacaagacacaaacaaatagtggaactcttcagcagtctcggctactgtttagccaagctggaccaaccaacatgtctcttcaagctaaaaactggctgcctggaccttgctacagacagcagcgtctgtcaaaacaggcaaacgacaacaacaacagcaactttccctggactgcagctacaaagtatcatctaaatggccgggactcgttggttaatccaggaccagctatggccagtcacaaggatgacgaagaaaagtttttccccatgcatggaaccctgatatttggtaaacaaggaacaaatgccaacgacgcggatttggaaaatgtcatgattacagatgaagaagaaatcagggccaccaatcccgtggctacggagcagtacgggactgtgtcaaataatttgcaaaactcaaacactggtccaactactggaactgtcaatcgccaaggagcgttacctggtatggtgtggcaggatcgagacgtgtacctgcagggacccatttgggccaagattcctcacaccgatggacactttcatccttctccactgatgggaggttttggactcaaacacccgcctcctcagatcatgatcaaaaacactcccgttccagccaatcctcccacaaacttcagttctgccaagtttgcttctttcatcacacagtattccacgggacaggtcagcgtggagatcgagtgggagctgcagaaggagaacagcaaacgctggaatcccgaaattcagtacacttccaactacaacaagtctgttaatgtggactttactgtggacactaatggtgtgtattcagagcctcgccccattggcaccagatacctgactcgtaatctgtaat

SEQ ID NO: 236 - protein, 735 aa, Adeno-associated virus
MAADGYPPDWLEDTLSEGIRQWWKLKPGPPPPKPAERHKDDSRGLVLPGYKYLGPFNGLDKGEPVNEADAAALEHDKAYDRQLDSGDNPYLKYNHADAEFQERLKEDTSFGGNLGRAVFQAKKRVLEPLGLVEEPVKTAPGKKRPVEHSPVEPDSSSGTGKAGQRPARKRLNFGQTGDADSVPDPQPLGQPPAAPSGLGSTTMATGSGAPMADNNEGADGVGNSSGNWHCDSQWLGDRVITTSTRTWALPTYNNHLYKQISSQSGASNDNHYFGYSTPWGYFDFNRFHCHFSPRDWQRLINNNWGFRPKRLNFKLFNIQVKEVTQNDGTTTIANNLTSTVQVFTDSEYQLPYVLGSAHQGCLPPFPADVFMVPQYGYLTLNNGSQAVGRSSFYCLEYFPSQMLRTGNNFQFSYTFEDVPFHSSYAHSQSLDRLMNPLIDQYLYYLNKTQTNSGTLQQSRLLFSQAGPTNMSLQAKNWLPGPCYRQQRLSKQANDNNNSNFPWTAATKYHLNGRDSLVNPGPAMASHKDDEEKFFPMHGTLIFGKQGTNANDADLENVMITDEEEIRATNPVATEQYGTVSNNLQNSNTGPTTGTVNRQGALPGMVWQDRDVYLQGPIWAKIPHTDGHFHPSPLMGGFGLKHPPPQIMIKNTPVPANPPTNFSSAKFASFITQYSTGQVSVEIEWELQKENSKRWNPEIQYTSNYNKSVNVDFTVDTNGVYSEPRPIGTRYLTRNL

SEQ ID NO: 237 - DNA, 2208 bp, Adeno-associated virus
  source 1..2208: mol_type = unassigned DNA
atggctgccgatggttatcttccagattggctcgaggacactctctctgaaggaataagacagtggtggaagctcaaacctggcccaccaccaccaaagcccgcagagcggcataaggacgacagcaggggtcttgtgcttcctgggtacaggtacctcggacccttcaacggactcgacaagggagagccggtcaacgaggcagacgccgcggccctcgagcacgacaaggcctacgaccggcagctcgacagcggagacaacccgtacctcaagtacaaccacgtcgacgcggagtttcaggagcgtcttaaagaagatacgtcttttgggggcaacctcggacgagcagtcttccaggccaaaaagaggattcttgaacctctgggcctggttgaggaacctgttaaggcggctccgggagaaaagaggccggtagagcactctcctgcggagccagactcctcctcgggaaccggaaaagcgggccagcagcctgcaagaaagagattgaattttggtcagactggagacgcagactcagtacctgacccccagcctctcggacagccaccagcagccccctctggtctgggaactaatacgatggcttcaggcagtggcgcaccaatggcagacaataacgagggcgccgacggagtgggtaattcctcgggaaattggcattgcgattccacatggatgggcgacagagtcatcaccaccagcacccgcacctgggccctgcccacctacaacaaccatctgtacaagcaaatctccagccagtctggagccagcaacgacaaccactactttggctacagcaccccctgggggcattttgacttcaacagattccactgccacttctccccacgtgactggcaaagactcatcaacaacaactggggattccggcccaagagactcagcttcaagctctttaacattcaagtcaaagaggtcacgcagaatgacggtacgacgacgattgccaataaccttaccagcacggttcaggtgtttactgactcggagtaccagctcccgtacgtcctcggctcggcgcatcaaggatgcctcccgccgttcccagcagacgtcttcatggtgccacagtatggatacctcaccctgaacaacggcagtcaggcggtaggacgctcttccttttactgcctggagtactttccttctcagatgcttcgtaccggaaacaactttaccttcagctacacctttgaagacgttcctttccatagcagctacgctcacagccaaagtctggaccgtctcatgaatcctctcatcgaccagtacctgtattacttgagcagaacaaacactccaagcggaaccaccacgatgtccaggcttcagttttctcaggccggagcaagtgacattcgggaccagtctagaaactggcttcctggaccctgttaccgccagcagcgagtatcaaagacagctgcggacaacaacaacagtgattactcgtggactggagctaccaagtaccacctcaatggaagagactctctggtgaatccgggcccagctatggccagccacaaggacgatgaagaaaaatattttcctcagagcggggttctcatctttggaaaacaagactcgggaaaaactaatgtggacattgaaaaggttatgattacagacgaagaggaaatcaggaccaccaatcccgtggctacggagcagtatggttctgtatctaccaacctccagagcggcaacacacaagcagctacctcagatgtcaacacacaaggcgttcttccaggcatggtctggcaggacagagacgtgtacctgcaggggcccatctgggcaaagattccacacacggacggacattttcacccctctccccccatgggcggattcggacttaaacaccctcctccacaaattctcatcaagaacaccccggtacctgcgaatccttcgaccactttcagtgcggcaaagtttgcttccttcatcacacagtactccacggggcaggtcagcgtggagatcgagtgggagctgcagaaggagaacagcaaacgctggaatcccgaaattcagtacacttccaactacaacaaatctgttaatgtggactttactgtggacactaatggtgtgtattcagagcctcgccccattggcgccagatacctgactcgtaatctgtaa

SEQ ID NO: 238 - protein, 735 aa, Adeno-associated virus
MAADGYLPDWLEDTLSEGIRQWWKLKPGPPPPKPAERHKDDSRGLVLPGYRYLGPFNGLDKGEPVNEADAAALEHDKAYDRQLDSGDNPYLKYNHVDAEFQERLKEDTSFGGNLGRAVFQAKKRILEPLGLVEEPVKAAPGEKRPVEHSPAEPDSSSGTGKAGQQPARKRLNFGQTGDADSVPDPQPLGQPPAAPSGLGTNTMASGSGAPMADNNEGADGVGNSSGNWHCDSTWMGDRVITTSTRTWALPTYNNHLYKQISSQSGASNDNHYFGYSTPWGHFDFNRFHCHFSPRDWQRLINNNWGFRPKRLSFKLFNIQVKEVTQNDGTTTIANNLTSTVQVFTDSEYQLPYVLGSAHQGCLPPFPADVFMVPQYGYLTLNNGSQAVGRSSFYCLEYFPSQMLRTGNNFTFSYTFEDVPFHSSYAHSQSLDRLMNPLIDQYLYYLSRTNTPSGTTTMSRLQFSQAGASDIRDQSRNWLPGPCYRQQRVSKTAADNNNSDYSWTGATKYHLNGRDSLVNPGPAMASHKDDEEKYFPQSGVLIFGKQDSGKTNVDIEKVMITDEEEIRTTNPVATEQYGSVSTNLQSGNTQAATSDVNTQGVLPGMVWQDRDVYLQGPIWAKIPHTDGHFHPSPPMGGFGLKHPPPQILIKNTPVPANPSTTFSAAKFASFITQYSTGQVSVEIEWELQKENSKRWNPEIQYTSNYNKSVNVDFTVDTNGVYSEPRPIGARYLTRNL

SEQ ID NO: 239 - DNA, 2208 bp, Adeno-associated virus
  source 1..2208: mol_type = unassigned DNA
atggctgccgatggttatcttccagattggctcgaggacaccctctctgaaggaataagacagtggtggaagctcaaacctggcccaccaccaccaaagcccgcagagcggcataaggacgacagcaggggtcttgtgcttcctgggtacaagtacctcggacccttcaacggactcgacaagggagagccggtcaacgaggcagacgccgcggccctcgagcacgacaaggcctacgaccggcagctcgacagcggagataacccgtacctcaagtacaaccacgccgacgcggagtttcaggagcgccttaaagaggatacgtcttttgggggcaacctcggacgagcagtcttccaggccaaaaagaggattcttgaacctctgggcctggttgaggaacctgttaagacggctccgggaaaaaagaggccggtagagcactctcctgcggagccagactcctcctcgggaaccggaaaagcgggccagcagcctgcaagaaagagattgaattttggtcagactggagacgcagactcagtacctgacccccggcctctcggacagccaccagcagccccctctggtctgggaactaatacgatggcttcaggcagtggcgcaccaatggcagacaataacgagggcgccgacggagtgggtaattcctcgggaaattggcattgcgattccacatggatgggcgacagagtcatcaccaccagcacccgcacctgggccctgcccacctacaacaaccatctgtacaagcaaatctccagccagtctggagccagcaacgacaaccactactttggctacagcaccccctgggggtattttgacttcaacagattccactgccacttctccccacgtgactggcaaagactcatcaacaacaactggggattccggcccaagagactcagcttcaagctctttaacattcaagtcaaagaggtcacgcagaatgacggtacgacgacgattgccaataaccttaccagcacggttcaggtgtttactgactcggagtaccagctcccgtacgtcctcggctcggcgcatcaaggatgcctcccgccgttcccagcagacgtcttcatggtgccacagtatggatacctcaccctgaacaacggcagtcaggcggtaggacgctcttccttttactgcctggagtactttccttctcagatgcttcgtaccggaaacaactttaccttcagctacacctttgaagacgttcctttccatagcagctacgctcacagccaaagtctggaccgtctcatgaatcctctcatcgaccagtacctgtattacttgagcagaacaaacactccaagcggaaccaccacgatgtccaggcttcagttttctcaggccggagcaagtgacattcgggaccagtctagaaactggcttcctggaccctgttaccgccagcagcgagtatcaaagacagctgcggacaacaacaacagtgattactcgtggactggagctaccaagtaccacctcaatggaagagactctctggtgaatccgggcccagctatggccagccacaaggacgatgaagaaaaatattttcctcagagcggggttctcatctttggaaaacaagactcgggaaaaactaatgtggacattgaaaaggttatgattacagacgaagaggaaatcaggaccaccaatcccgtggctacggagcagtatggttctgtatctaccaacctccagagcggcaacacacaagcagctacctcagatgtcaacacacaaggcgttcttccaggcatggtctggcaggacagagacgtgtacctgcaggggcccatctgggcaaagattccacacacggacggacattttcacccctctcccctcatgggcggattcggacttaaacaccctcctccacaaattctcatcaagaacaccccggtacctgcgaatccttcgaccactttcagtgcggcaaagtttgcttccttcatcacacagtactccacggggcaggtcagcgtggagatcgagtgggagctgcagaaggagaacagcaaacgctggaatcccgaaattcagtacacttccaactacaacaaatctgttaatgtggactttactgtggacactaatggtgtgtattcagagcctcgccccattggcaccagatacctgactcgtaatctgtaa

SEQ ID NO: 240 - protein, 735 aa, Adeno-associated virus
MAADGYLPDWLEDTLSEGIRQWWKLKPGPPPPKPAERHKDDSRGLVLPGYKYLGPFNGLDKGEPVNEADAAALEHDKAYDRQLDSGDNPYLKYNHADAEFQERLKEDTSFGGNLGRAVFQAKKRILEPLGLVEEPVKTAPGKKRPVEHSPAEPDSSSGTGKAGQQPARKRLNFGQTGDADSVPDPRPLGQPPAAPSGLGTNTMASGSGAPMADNNEGADGVGNSSGNWHCDSTWMGDRVITTSTRTWALPTYNNHLYKQISSQSGASNDNHYFGYSTPWGYFDFNRFHCHFSPRDWQRLINNNWGFRPKRLSFKLFNIQVKEVTQNDGTTTIANNLTSTVQVFTDSEYQLPYVLGSAHQGCLPPFPADVFMVPQYGYLTLNNGSQAVGRSSFYCLEYFPSQMLRTGNNFTFSYTFEDVPFHSSYAHSQSLDRLMNPLIDQYLYYLSRTNTPSGTTTMSRLQFSQAGASDIRDQSRNWLPGPCYRQQRVSKTAADNNNSDYSWTGATKYHLNGRDSLVNPGPAMASHKDDEEKYFPQSGVLIFGKQDSGKTNVDIEKVMITDEEEIRTTNPVATEQYGSVSTNLQSGNTQAATSDVNTQGVLPGMVWQDRDVYLQGPIWAKIPHTDGHFHPSPLMGGFGLKHPPPQILIKNTPVPANPSTTFSAAKFASFITQYSTGQVSVEIEWELQKENSKRWNPEIQYTSNYNKSVNVDFTVDTNGVYSEPRPIGTRYLTRNL

SEQ ID NO: 241 - DNA, 2208 bp, Adeno-associated virus
  source 1..2208: mol_type = unassigned DNA
atggctgccgatggttatcttccagattggctcgaggacactctctctgaaggaataagacagtggtggaagctcaaacctggcccaccaccaccaaagcccgcagagcggcataaggacgacagcaggggtcttgtgcttcctgggtacaagtacctcggacccttcaacggactcgacaagggagagccggtcaacgaggcagacgccgcggccctcgagcacgacaaggcctacgaccggcagctcgacagcggagacaacccgtacctcaagtacaaccacgccgacgcggagtttcaggagcgccttaaaggagatacgtcttttgggggcaacctcggacgagcagtcttccaggccaaaaagaggattcttgaacctctgggcctggttgaggaacctgttaagacggctccgggaaaaaagaggccggtagagcactctcctgcggagccagactcctcctcgggaaccggaaaagcgggccagcagcctgcaagaaagagattgaattttggtcagactggagacgcagactcagtacctgacccccagcctctcggacagccaccagcagccccctctggtctgggaactaatacgatggcttcaggcagtggcgcaccaatggcagacaataacgagggcgccgacggagtgggtaattcctcgggaaattggcattgcgattccacatggatgggcggcagagtcatcaccaccagcacccgcacctgggccctgcccacctacaacaaccatctgtacaagcaaatctccagccagtctggagccagcaacgacaaccactactttggctacagcaccccctgggggtattttgacttcaacagattccactgccacttctccccacgtgactggcaaagactcatcaacaacaactggggattccggcccaagagactcagcttcaagctctttaacattcaagtcaaagaggtcacgcagaatgacggtacgacgacgattgccaataaccttaccagcacggttcaggtgtttactgactcggagtaccagctcccgtacgtcctcggctcggcgcatcaaggatgcctcccgccgttcccagcagacgtcttcatggtgccacagtatggatacctcaccctgaacaacggcagtcaggcggtaggacgctcttccttttactgcctggagtactttccttctcagacgcttcgtaccggaaacaactttaccttcagctacacctttgaagacgttcctttccatagcagctacgctcacagccaaagtctggaccgtctcatgaatcctctcatcgaccagtacctgtattacttgagcagaacaaacactccaagcggaaccaccacgatgtccaggcttcagttttctcaggccggagcaagtgacattcgggaccagtctagaaactggcttcctggaccctgttaccgccagcagcgagtatcaaagacagctgcggacaacaacaacagtgattactcgtggactggagctaccaagtaccacctcaatggaagagactctctggtgaatccgggcccagctatggccagccacaaggacgatgaagaaaaatattttcctcagagcggggttctcatctttggaaaacaagactcgggaaaaactaatgtggacattgaaaaggttatgattacagacgaagaggaaatcaggaccaccaatcccgtggctacggagcagtatggttctgtatctaccaacctccagagcggcaacacacaagcagctacctcagatgtcaacacacaaggcgttcttccaggcatggtctggcaggacagagacgtgtacctgcaggggcccatctgggcaaagattccacacacggacggacattttcacccctctcccctcatgggcggattcggacttaaacaccctcctccacaaattctcatcaagaacaccccggtacctgcgaatccttcgaccactttcagtgcggcaaagtttgcttccttcatcacacagtactccacggggcaggtcagcgtggagatcgagtgggagctgcagaaggagaacagcaaacgctggaatcccgaaattcagtacacttccaactacaacaaatctgttaatgtggactttactgtggacactaatggtgtgtattcagagcctcgccccattggcaccagatacctgactcgtaatctgtaa

SEQ ID NO: 242 - protein, 735 aa, Adeno-associated virus
MAADGYLPDWLEDTLSEGIRQWWKLKPGPPPPKPAERHKDDSRGLVLPGYKYLGPFNGLDKGEPVNEADAAALEHDKAYDRQLDSGDNPYLKYNHADAEFQERLKGDTSFGGNLGRAVFQAKKRILEPLGLVEEPVKTAPGKKRPVEHSPAEPDSSSGTGKAGQQPARKRLNFGQTGDADSVPDPQPLGQPPAAPSGLGTNTMASGSGAPMADNNEGADGVGNSSGNWHCDSTWMGGRVITTSTRTWALPTYNNHLYKQISSQSGASNDNHYFGYSTPWGYFDFNRFHCHFSPRDWQRLINNNWGFRPKRLSFKLFNIQVKEVTQNDGTTTIANNLTSTVQVFTDSEYQLPYVLGSAHQGCLPPFPADVFMVPQYGYLTLNNGSQAVGRSSFYCLEYFPSQTLRTGNNFTFSYTFEDVPFHSSYAHSQSLDRLMNPLIDQYLYYLSRTNTPSGTTTMSRLQFSQAGASDIRDQSRNWLPGPCYRQQRVSKTAADNNNSDYSWTGATKYHLNGRDSLVNPGPAMASHKDDEEKYFPQSGVLIFGKQDSGKTNVDIEKVMITDEEEIRTTNPVATEQYGSVSTNLQSGNTQAATSDVNTQGVLPGMVWQDRDVYLQGPIWAKIPHTDGHFHPSPLMGGFGLKHPPPQILIKNTPVPANPSTTFSAAKFASFITQYSTGQVSVEIEWELQKENSKRWNPEIQYTSNYNKSVNVDFTVDTNGVYSEPRPIGTRYLTRNL

SEQ ID NO: 243 - DNA, 2208 bp, Adeno-associated virus
  source 1..2208: mol_type = unassigned DNA
atggctgccgatggttatcttccagattggctcgaggacactctctctgaaggaataagacagtggtggaagctcaaacctggcccaccaccaccaaagcccgcagagcggcataaggacgacagcaggggtcttgtgcttcctgggtacaagtacctcggacccttcaacggactcgacaagggagagccggtcaacgaggcagacgccgcggccctcgagcacgacaaggcctacgaccggcagctcgacagcggagacaacccgtacctcaagtacaaccacgccgacgcggagtttcaggagcgtcttaaagaagatacgtcttttgggggcaacctcggacgagcagtcttccaggccaaaaagaggattcttgaacctctgggcctggttgaggaacctgttaagacggctccgggaaaaaagaggccggtagagcactctcctgcggagccagactcctcctcgggaaccggaaaagcgggccagcagcctgcaagaaagagattgaattttggtcagactggagacgcagactcagtacctgacccccagcctctcggacagccaccagcagccccctctggtctgggaactaatacgatggcttcaggcagtggcgcaccaatggcagacaataacgagggcgccgacggagtgggtaattcctcgggaaattggcattgcgattccacatggatgggcgacagagtcatcaccaccagcacccgcacctgggccctgcccacctgcaacaaccatctgtacaagcaaatctccagccagtctggagccagcaacgacaaccactactttggctacagcaccccctgggggtattttgacttcaacagattccactgccacttctccccacgtgactggcaaagactcatcaacaacaactggggattccggcccaagagactcagcttcaagctctttaacattcaagtcaaagaggtcacgcagaatgacggtacgacgacgattgccaataaccttaccagcacggttcaggtgtttactgactcggagtaccagctcccgtacgtcctcggctcggcgcatcaaggatgcctcccgccgttcccagcagacgtcttcatggtgccacagtatggatacctcaccctgaacaacggcagtcaggcggtaggacgctcttccttttactgcctggagtattttccttctcagatgcttcgtaccggaaacaactttaccttcagctacacctttgaagacgttcctttccatagcagctacgctcacagccaaagtctggaccgtctcatgaatcctctcatcgaccagtacctgtattacttgagcagaacaaacactccaagcggaaccaccacgatgtccaggcttcagttttctcaggccggagcaagtgacattcgggaccagtctagaaactggcttcctggaccctgttaccgccagcagcgagtatcaaagacagctgcggacaacaacaacagtgattactcgtggactggagctaccaagtaccacctcaatggaagagactctctggtgaatccgggcccagctatggccagccacaaggacgatgaagaaaaatattttcctcagagcggggttctcatctttggaaaacaagactcgggaaaaactaatgtggacattgaaaaggttatgattacagacgaagaggaaatcaggaccaccaatcccgtggctacggagcagtatggttctgtatctacctacctccagagcggcaacacacaagcagctacctcagatgtcaacacacaaggcgttcttccaggcatggtctggcaggacagagacgtgtacctgcgggggcccatctgggcaaagattccacacacggacggacattttcacccctctcccctcatgggcggatttggacttaaacaccctcctccacaaattctcatcaagaacaccccggtacctgcgaatccttcgaccactttcagtgcggcaaagtttgcttccttcatcacacagtactccacggggcaggtcagcgtggagatcgagtgggagctgcagaaggagaacagcaaacgctggaatcccgaaattcagtacacttccaactacaacaaatctgttaatgtggactttactgtggacactaatggtgtgtattcagagcctcgccccattggcaccagatacctgactcgtaatctgtaa

SEQ ID NO: 244 - protein, 735 aa, Adeno-associated virus
MAADGYLPDWLEDTLSEGIRQWWKLKPGPPPPKPAERHKDDSRGLVLPGYKYLGPFNGLDKGEPVNEADAAALEHDKAYDRQLDSGDNPYLKYNHADAEFQERLKEDTSFGGNLGRAVFQAKKRILEPLGLVEEPVKTAPGKKRPVEHSPAEPDSSSGTGKAGQQPARKRLNFGQTGDADSVPDPQPLGQPPAAPSGLGTNTMASGSGAPMADNNEGADGVGNSSGNWHCDSTWMGDRVITTSTRTWALPTCNNHLYKQISSQSGASNDNHYFGYSTPWGYFDFNRFHCHFSPRDWQRLINNNWGFRPKRLSFKLFNIQVKEVTQNDGTTTIANNLTSTVQVFTDSEYQLPYVLGSAHQGCLPPFPADVFMVPQYGYLTLNNGSQAVGRSSFYCLEYFPSQMLRTGNNFTFSYTFEDVPFHSSYAHSQSLDRLMNPLIDQYLYYLSRTNTPSGTTTMSRLQFSQAGASDIRDQSRNWLPGPCYRQQRVSKTAADNNNSDYSWTGATKYHLNGRDSLVNPGPAMASHKDDEEKYFPQSGVLIFGKQDSGKTNVDIEKVMITDEEEIRTTNPVATEQYGSVSTYLQSGNTQAATSDVNTQGVLPGMVWQDRDVYLRGPIWAKIPHTDGHFHPSPLMGGFGLKHPPPQILIKNTPVPANPSTTFSAAKFASFITQYSTGQVSVEIEWELQKENSKRWNPEIQYTSNYNKSVNVDFTVDTNGVYSEPRPIGTRYLTRNL

SEQ ID NO: 245 - DNA, 2208 bp, Adeno-associated virus; identical to SEQ ID NO: 239
  source 1..2208: mol_type = unassigned DNA

SEQ ID NO: 246 - protein, 735 aa, Adeno-associated virus; identical to SEQ ID NO: 240

SEQ ID NO: 247 - DNA, 2208 bp, Adeno-associated virus
  source 1..2208: mol_type = unassigned DNA
atggctgccgatggttatcttccagattggctcgaggacactctctctgaaggaataagacagtggtggaagctcaaacctggcccaccaccaccaaagcccgcagagcggcataaggacggcagcaggggtcttgtgcttcctgggtacaagtacctcggacccttcaacggactcgacaagggagagccggtcaacgaggcagacgccgcggccctcgagcacgacaaggcctacgaccggcagctcaacagcggagacaacccgtacctcaagtacaaccacgccgacgcggagtttcaggagcgccttaaagaagatacgtcttttgggggcaacctcggacgagcagtcttccaggcaaaaaagagggttcttgaacctctgggcctggttgaggagcctgttaaaacggctccgggaaaaaagagaccggtagagcactctcctgcggagccagactcctcctcgggaaccggaaaagcgggccagcagcctgcaagaaagagattgaattttggtcagactggagacgcagactccgtacctgacccccagcctctcggacagccaccagcagccccctctggtctgggatctactacaatggctacaggcagtggcgcaccaatggcagacaataacgagggtgccgatggagtgggtaattcctcaggaaattggcattgcgattcccaatggctgggcgacagagtcatcaccacaagcactcgaacctgggccctgcccacctacaacaaccacctctacaagcaaatctccagccaatcaggagcctcaaacgacaaccactattttggctacagcaccccttgggggtattttgacttcaacagattccactgccacttttcaccacgtgactggcaaagactcatcaacaacaactggggattccgacccaagagactcaacttcaagctctttaacattcaagtcaaagaggtcacgcagaatgacggtacgacgacgattgccaataaccttaccagcacggttcaggtgtttactgactcggagtaccagctcccgtacgtcctcggctcggcgcatcaaggatgcctcccgccgttcccagcggacgtcttcatggtcccacagtatggatacctcaccctgaacaacgggagtcaggcggtaggacgctctcccttttactgcctggagtactttccttctcagatgctgcgtactggaaacaactttcagttcagctacacttttgaagacgtgcctttccacagcagctacgctcacagccagagtctggatcggctgatgaatcctctgatcgaccagtacctgtattatctgaacaagacacaaacaaatagtggaactcttcagcagtctcggctactgtttagccaagctggacccaccaacatgtctcttcaagctaaaaactggctgcctggaccttgctacagacagcagcgtctgtcaaagcaggcaaacgacaacaacaacagcaactttccctggactgcagctacaaagtatcatctaaatggccgggactcgttggttaatccaggaccagctatggccagtcacaaggatgacgaagaaaagtttttccccatgcatggaaccctgatatttggtaaacaaggaacaaatgccaacgacgcggatttggaaaatgtcatgattacagatgaagaagaaatcaggaccaccaatcccgtggctacggagcagtacgggactgtgtcaaataatttgcaaaactcaaacactggtccaactactggaactgtcaatcaccaaggagcgttacctggtatggtgtggcaggatcgagatgtgtaccttcagggacccatttgggccaagattcctcacaccgatggacactttcatccttctccactgatgggaggttttggactcaaacacccgcctcctcagattatgatcaaaaacactcccgttccagccaatcctcctacaaacttcagttctgccaagtttgcttctttcatcacacagtattccacggggcaggtcagcgtggagatcgagtgggagctgcagaaggagaacagcaaacgctggaatcccgaaattcagtacacttccaactacaacaaatctgttaatgtggactttactgtggacaataatggcgtgtactcagagcctcgccccattggcaccagatacctgactcgtaatctgtaa

SEQ ID NO: 248 - protein, 735 aa, Adeno-associated virus
MAADGYLPDWLEDTLSEGIRQWWKLKPGPPPPKPAERHKDGSRGLVLPGYKYLGPFNGLDKGEPVNEADAAALEHDKAYDRQLNSGDNPYLKYNHADAEFQERLKEDTSFGGNLGRAVFQAKKRVLEPLGLVEEPVKTAPGKKRPVEHSPAEPDSSSGTGKAGQQPARKRLNFGQTGDADSVPDPQPLGQPPAAPSGLGSTTMATGSGAPMADNNEGADGVGNSSGNWHCDSQWLGDRVITTSTRTWALPTYNNHLYKQISSQSGASNDNHYFGYSTPWGYFDFNRFHCHFSPRDWQRLINNNWGFRPKRLNFKLFNIQVKEVTQNDGTTTIANNLTSTVQVFTDSEYQLPYVLGSAHQGCLPPFPADVFMVPQYGYLTLNNGSQAVGRSPFYCLEYFPSQMLRTGNNFQFSYTFEDVPFHSSYAHSQSLDRLMNPLIDQYLYYLNKTQTNSGTLQQSRLLFSQAGPTNMSLQAKNWLPGPCYRQQRLSKQANDNNNSNFPWTAATKYHLNGRDSLVNPGPAMASHKDDEEKFFPMHGTLIFGKQGTNANDADLENVMITDEEEIRTTNPVATEQYGTVSNNLQNSNTGPTTGTVNHQGALPGMVWQDRDVYLQGPIWAKIPHTDGHFHPSPLMGGFGLKHPPPQIMIKNTPVPANPPTNFSSAKFASFITQYSTGQVSVEIEWELQKENSKRWNPEIQYTSNYNKSVNVDFTVDNNGVYSEPRPIGTRYLTRNL

SEQ ID NO: 249 - DNA, 2208 bp, Adeno-associated virus
  source 1..2208: mol_type = unassigned DNA
atggctgccgatggttatcttccagattggctcgaggacactctctctgaaggaataagacagtggtggaagctcaaacctggcccaccaccaccaaagcccgcagagcggcataaggacgacagcaggggtcttgtgcttcctgggtacaagtacctcggacccttcaacggactcgacaagggagagccggtcaacgaggcagacgccgcggccctcgagcacgacaaggcctacgaccggcagctcgacagcggagacaacccgtacctcaagtacaaccacgccgacgcggagtttcaggagcgtcttaaagaagatacgtcttttgggggcaacctcggacgagcagtcttccaggccaaaaagaggattcttgaacctctgggcctggttgaggaacctgttaagacggctccgggaaaaaagaggccggtagagcactctcctgcggagccagactcctcctcgggaaccggaaaagcgggccagcagcctgcaagaaagagattgaattttggtcagactggagacgcagactcagtacctgacccccagcctctcggacagccaccagcagccccctctggtctgggaactaatacgatggcttcaggcagtggcgcaccaatggcagacaataacgagggcgccgacggagtgggtaattcctcgggaaattggcattgcgattccacatggatgggcgacagagtcatcaccaccagcacccgcacctgggccctgcccacctacaacaaccatctgtacaagcaaatctccagccagtctggagccagcaacgacaaccactactttggctacagcaccccctgggggtattttgacttcaacagattccactgccacttctccccacgtgactggcaaagactcatcaacaacaactggggattccggcccaagagactcagcttcaagctctttaacattcaagtcaaagaggtcacgcagaatgacggtacgacgacgattgccaataaccttaccagcacggttcaggtgtttactgactcggagtaccagctcccgtacgtcctcggctcggcgcatcaaggatgcctcccgccgttcccagcagacgtcttcatggtgccacagtatggatacctcaccctgaacaacggcagtcaggcggtaggacgctcttccttttactgcctggagtactttccttctcagatgcttcgtaccggaaacaactttaccttcagctacacctttgaagacgttcctttccatagcagctacgctcacagccaaagtctggaccgtctcatgaatcctctcatcgaccagtacctgtattacttgagcagaacaaacactccaagcggaaccaccacgatgtccaggcttcagttttctcaggccggagcaagtgacattcgggaccagtctagaaactggcttcctggaccctgttaccgccagcagcgagtatcaaagacagctgcggacaacaacaacagtgattactcgtggactggagctaccaagtaccacctcaatggaagagactctctggtgaatccgggcccagctatggccagccacaaggacgatgaagaaaaatattttcctcagagcggggttctcatctttggaaaacaagactcgggaaaaactaatgtggacattgaaaaggttatgattacagacgaagaggaaatcaggaccaccaatcccgtggctacggagcagtatggttctgtatctaccaacctccagagcggcaacacacaagcagctacctcagatgtcaacacacaaggcgttcttccaggcatggtctggcaggacagagacgtgtacctgcaggggcccatctgggcaaagattccacacacggacggacattttcacccctctcccctcatgggcggattcggacttaaacaccctcctccacaaattctcatcaagaacaccccggtacctgcgaatccttcgaccactttcagtgcggcaaagtttgcttccttcatcacacagtactccacggggcaggtcagcgtggagatcgagtgggagctgcagaaggagaacagcaaacgctggaatcccgaaattcagtacacttccaactacaacaaatctgttaatgtggactttactgtggacactaatggtgtgtattcagagcctcgccccattggcaccagatacctgactcgtaatctgtaa

SEQ ID NO: 250 - protein, 735 aa, Adeno-associated virus
MAADGYLPDWLEDTLSEGIRQWWKLKPGPPPPKPAERHKDDSRGLVLPGYKYLGPFNGLDKGEPVNEADAAALEHDKAYDRQLDSGDNPYLKYNHADAEFQERLKEDTSFGGNLGRAVFQAKKRILEPLGLVEEPVKTAPGKKRPVEHSPAEPDSSSGTGKAGQQPARKRLNFGQTGDADSVPDPQPLGQPPAAPSGLGTNTMASGSGAPMADNNEGADGVGNSSGNWHCDSTWMGDRVITTSTRTWALPTYNNHLYKQISSQSGASNDNHYFGYSTPWGYFDFNRFHCHFSPRDWQRLINNNWGFRPKRLSFKLFNIQVKEVTQNDGTTTIANNLTSTVQVFTDSEYQLPYVLGSAHQGCLPPFPADVFMVPQYGYLTLNNGSQAVGRSSFYCLEYFPSQMLRTGNNFTFSYTFEDVPFHSSYAHSQSLDRLMNPLIDQYLYYLSRTNTPSGTTTMSRLQFSQAGASDIRDQSRNWLPGPCYRQQRVSKTAADNNNSDYSWTGATKYHLNGRDSLVNPGPAMASHKDDEEKYFPQSGVLIFGKQDSGKTNVDIEKVMITDEEEIRTTNPVATEQYGSVSTNLQSGNTQAATSDVNTQGVLPGMVWQDRDVYLQGPIWAKIPHTDGHFHPSPLMGGFGLKHPPPQILIKNTPVPANPSTTFSAAKFASFITQYSTGQVSVEIEWELQKENSKRWNPEIQYTSNYNKSVNVDFTVDTNGVYSEPRPIGTRYLTRNL

SEQ ID NO: 251 - DNA, 2208 bp, Adeno-associated virus
  source 1..2208: mol_type = unassigned DNA
atggctgccgatggttatcttccagattggctcgaggacactctctctgaaggaataagacagtggtggaagctcaaacctggcccaccaccaccaaagcccgcagagcggcataaggacgacagcaggggtcttgtgcttcctgggtacaagtacctcggacccttcaacggactcgacaagggagagccggtcaacgaggcagacgccgcggccctcgagcacgacaaggcctacgaccggcagctcgacagcggagacaacccgtacctcaagtacaaccacgccgacgcggagtttcaggagcgtcttaaagaagatacgtcttttgggggcaacctcggacgagcagtcttccaggccaaaaagaggattcttgaacctctgggcctggttgaggaacctgttaagacggctccgggaaaaaagaggccggtagagcactctcctgcggagccagactcctcctcgggaaccggaaaagcgggccagcagcctgcaagaaagagattgaattttggtcagactggagacgcagactcagtacctgacccccagcctctcggacagccaccagcagccccctctggtctgggaactaatacgatggcttcaggcagtggcgcaccaatggcagacaataacgagggcgccgacggagtgggtaattcctcgggaaattggcattgcgattccacatggatgggcgacagagtcatcaccaccagcacccgcacctgggccctgcccacctacaacaaccatctgtacaagcaaatctccagccagtctggagccagcaacgacaaccactactttggctacagcaccccctgggggtatttcgacttcaacagattccactgccacttctccccacgtgactggcaaagactcatcaacaacaactggggattccggcccaagagactcagcttcaagctctttaacattcaagtcaaagaggtcacgcagaatgacggtacgacgacgattgccaataaccttaccagcacggttcaggtgtttactgactcggggtaccagctcccgtacgtcctcggctcggcgcatcaaggatgccttccgccgttcccagcagacgtcttcatggtgccacagtatggatacctcaccctgaacaacggcagtcaggcggtaggacgctcttccttttactgcctggagtactttccttctcagatgcttcgtaccggaaacaactttaccttcagctacacctttgaagacgttcctttccatagcagctacgctcacggccaaagtctggaccgtctcatgaatcctctcatcgaccagtacctgtattacttgagcagaacaaacactccaagcggaaccaccacgatgtccaggcttcagttttctcaggccggagcaagtgacgttcgggaccagtctagaaactggcttcctggaccctgttaccgccagcagcgagtatcaaagacagctgcggacaacaacaacagtgattactcgtggactggagctaccaagtaccacctcaatggaagagactctctggtgaatccgggcccagctatggccagccacaaggacgatgaagaaaaatattttcctcagagcggggttctcgtctttggaaaacaagactcgggaaaaactaatgtggacattgaaaaggttatgattacagacgaagaggaaatcaggaccaccaatcccgcggctacggagcagtatggttctgtatctaccaacctccagagcggcaacacacaagcagctacctcagatgtcaacacacaaggcgttcttccaggcatggtctggcaggacagagacgtgtacctgcaggggcccatctgggcaaagattccacacacggacggacattttcacccctctcccctcatgggcggattcggacttaaacaccctcctccacaaattctcatcaagaacaccccggtacctgcgaatccttcgaccactttcagtgcggcaaagtttgtttccttcatcacacagtactccacggggcaggtcagcgtggagatcgagtgggagctgcagaaggagaacagcaaacgctggaatcccgaaattcagtacacttccaactacaacaaatctgttaatgtggactttactgtggacactaatggtgtgtattcagagcctcgccccattggcaccagatacctgactcgtaatctgtaa

SEQ ID NO: 252 - protein, 735 aa, Adeno-associated virus
MAADGYLPDWLEDTLSEGIRQWWKLKPGPPPPKPAERHKDDSRGLVLPGYKYLGPFNGLDKGEPVNEADAAALEHDKAYDRQLDSGDNPYLKYNHADAEFQERLKEDTSFGGNLGRAVFQAKKRILEPLGLVEEPVKTAPGKKRPVEHSPAEPDSSSGTGKAGQQPARKRLNFGQTGDADSVPDPQPLGQPPAAPSGLGTNTMASGSGAPMADNNEGADGVGNSSGNWHCDSTWMGDRVITTSTRTWALPTYNNHLYKQISSQSGASNDNHYFGYSTPWGYFDFNRFHCHFSPRDWQRLINNNWGFRPKRLSFKLFNIQVKEVTQNDGTTTIANNLTSTVQVFTDSGYQLPYVLGSAHQGCLPPFPADVFMVPQYGYLTLNNGSQAVGRSSFYCLEYFPSQMLRTGNNFTFSYTFEDVPFHSSYAHGQSLDRLMNPLIDQYLYYLSRTNTPSGTTTMSRLQFSQAGASDVRDQSRNWLPGPCYRQQRVSKTAADNNNSDYSWTGATKYHLNGRDSLVNPGPAMASHKDDEEKYFPQSGVLVFGKQDSGKTNVDIEKVMITDEEEIRTTNPAATEQYGSVSTNLQSGNTQAATSDVNTQGVLPGMVWQDRDVYLQGPIWAKIPHTDGHFHPSPLMGGFGLKHPPPQILIKNTPVPANPSTTFSAAKFVSFITQYSTGQVSVEIEWELQKENSKRWNPEIQYTSNYNKSVNVDFTVDTNGVYSEPRPIGTRYLTRNL

SEQ ID NO: 253 - DNA, 2208 bp, Adeno-associated virus
  source 1..2208: mol_type = unassigned DNA
atggctgccgatggttatcttccagattggctcgaggacactctctctgaaggaataagacagtggtggaaactcaaacctggcccaccaccaccaaagcccgcagagcggcataaggacgacagcaggggtcttgtgcttcctgggtacaagtacctcggacccttcaacggactcgacaagggagagccggtcaacgaggcagacgccgcggccctcgagcacgacaaggcctacgaccggcagctcgacagcggagacaacccgtacctcaagtacaaccacgccgacgcggagtttcaggagcgccttaaagaagatacgtcttttgggggcaacctcggacgagcagtcttccaggcaaaaaagagggttctggaacctctgagcctggttgaggagcctgttaagacggctccgggaaaaaagaggccggtagagcactctcccgcagagccagattcctcctccggaactggaaagtcgggcaaccagcctgcaagaaagagattgaatttcggtcagactggagactcagactccgtacctgacccccagcctctcggacagccaccagcagccccctctggtctgggaactaatacgatggctacaggcagtggcgcaccaatggcagacaataacgagggcgccgacggagtgggtaattcctcgggaaattggcattgcgattccacatggatgggcgacagagtcatcaccaccagcacccgaacctgggccctgcccacctacaacaaccatctgtacaagcaaatatccagccagtctggagccagcaacgacaatcactactttggctacagcaccccctgggggtattttgacttcaacagattccactgccacttttcaccacgtgactggcaaagactcatcaacaacaactggggattccgacccaagagactcaacttcaagctctttaacattcaagtcaaagaggtcacgcagaatgacggtacgacgacgattgccaataaccttaccagcacggttcaggtgtttactgactcggagtaccagctcccgtacgtcctcggctcggcgcatcaaggatgcctcccgccgttcccagcagacgtcttcatggtgccacagtatggatacctcaccctgaacaacgggagtcaggcagtaggacgctcttcattttactgcctagagtactttccttctcagatgctgcgtaccggaaacaactttaccttcagctacacctttgaggacgttcctttccacagcagctacgctcacagccagagtttggaccgtctcatgaatcctctcatcgaccagtacctgtattacttgagcagaacaaacactccaagcggaaccaccacgcagtccaggcttcagttttctcaggccggagcgagtgacattcaggaccagtctaggaactggcttcctggaccctgttaccgtcagcagcgagtatcaaagacatctgcggataacaacaacagtgaatactcgtggactggagctaccaagtaccacctcaatggcagagactctctggtgaatccgggcccggccatggccagccacaaagacgatgaagaaaagttttttcctcagagcggggttcttatctttgggaagcaaggctcagagaaaacaaatgtggatattgaaaaggtcatgattacagacgaagaggaaatcaggaccaccaatcccgtggctacggagcagtatggttctgtatctaccaacctccagagcggcaacacacaagcagctaccgcagatgtcaacacacaaggcgttcttccaggcatggtcgggcaagacagagacgtgtacctgcaggggcctacttgggcaaagattccacacacggacggacattttcacccctctcccctcatgggcggatttggacttaaacaccctcctccacagattctcatcaagaacaccccggtacctgcgaatccttcgaccaccttcagtgcggcaaagtttgcttccttcattacacagtactccacggggcaggtcagcgtggagatcgagtgggagctgcagaaggagaacagcaaacgctggaatcccgagatccagtacacttccaactacaacaagtctgttaatgtggactttactgtggacactaatggcgtgtattcagagcctcgccccattggcaccagatacctgactcgtaatctgtaa

SEQ ID NO: 254 - protein, 735 aa, Adeno-associated virus
MAADGYLPDWLEDTLSEGIRQWWKLKPGPPPPKPAERHKDDSRGLVLPGYKYLGPFNGLDKGEPVNEADAAALEHDKAYDRQLDSGDNPYLKYNHADAEFQERLKEDTSFGGNLGRAVFQAKKRVLEPLSLVEEPVKTAPGKKRPVEHSPAEPDSSSGTGKSGNQPARKRLNFGQTGDSDSVPDPQPLGQPPAAPSGLGTNTMATGSGAPMADNNEGADGVGNSSGNWHCDSTWMGDRVITTSTRTWALPTYNNHLYKQISSQSGASNDNHYFGYSTPWGYFDFNRFHCHFSPRDWQRLINNNWGFRPKRLNFKLFNIQVKEVTQNDGTTTIANNLTSTVQVFTDSEYQLPYVLGSAHQGCLPPFPADVFMVPQYGYLTLNNGSQAVGRSSFYCLEYFPSQMLRTGNNFTFSYTFEDVPFHSSYAHSQSLDRLMNPLIDQYLYYLSRTNTPSGTTTQSRLQFSQAGASDIQDQSRNWLPGPCYRQQRVSKTSADNNNSEYSWTGATKYHLNGRDSLVNPGPAMASHKDDEEKFFPQSGVLIFGKQGSEKTNVDIEKVMITDEEEIRTTNPVATEQYGSVSTNLQSGNTQAATADVNTQGVLPGMVGQDRDVYLQGPTWAKIPHTDGHFHPSPLMGGFGLKHPPPQILIKNTPVPANPSTTFSAAKFASFITQYSTGQVSVEIEWELQKENSKRWNPEIQYTSNYNKSVNVDFTVDTNGVYSEPRPIGTRYLTRNL

SEQ ID NO: 255 - DNA, 2208 bp, Adeno-associated virus
  source 1..2208: mol_type = unassigned DNA
atggctgccgatggttatcttccagattggctcgaggacactctctctgaaggaataagacagtggtggaagctcaaacctggcccaccaccaccaaagcccgcagagcggcataaggacgacagcaggggtcttgtgcttcctgggtacaagtacctcggacccttcaacggactcgacaagggagagccggtcaacgaggcagacgccgcggccctcgagcacgacaaggcctacgaccggcagctcgacagcggagacaacccgtacctcaagtacaaccacgccgacgcagagtttcaggagcgccttaaagaagatacgtcttttgggggcaacctcggacgagcagtcttccaggcaaaaaagagggttctggaacctctgggcctggttgaggagcctgttaagacggctccgggaaaaaagaggccggtagagcactctcctgcagagccagattcctcctccggaactggaaagtcgggcaaccagcctgcaagaaagagattgaatttcggtcagactggagactcagactccgtacctgacccccagcctctcggacagccaccagcagccccctctggtctgggaactaatacgatggctacaggcagtggcgcaccaatggcagacaataacgagggcgccgacggagtgggtaattcctcgggaaattggcattgcgattccacatggatgggcgacagagtcatcaccaccagcacccgaacctgggccctgcccacctacaacaaccatctgtacaagcaaatatccagccagtctggagccagcaacgacaatcactactttggctacagcaccccctgggggtattttgacttcaacagattccactgccacttttcaccacgtgactggcaaagactcatcaacaacaactggggattccgacccaagagactcaacttcaagctctttaacattcaagtcaaagaggtcacgcagaatgacggtacgacgacgattgccaataaccttaccagcacggttcaggtgtttactgactcggagtaccagctcccgtacgtcctcggctcggcgcatcaaggatgcctcccgccgttcccagcagacgtcttcatggtgccacagtatggatacctcaccctgaacaacgggagtcaggcagtaggacgctcttcattttactgcctagggtactttccttctcagatgctgcgtaccggaaacaactttaccttcagctacacctttgaggacgttcctttccacagcagctacgctcacagccagagtttggaccgtctcatgaatcctctcatcgaccagtacctgtattacttgagcagaacaaacactccaagcggaaccaccacgcagtccaggcttcagttttctcaggccggagcgagtgacattcgggaccagtctaggaactggcttcctggaccctgttaccgtcagcagcgagtatcaaagacatctgcggataacaacaacagtgaatactcgtggactggagctaccaagtaccacctcaatggcagagactctctggtgaatccgggcccggccatggccagccacaaagacgatgaagaaaagttttttcctcagagcggggttcttatctttgggaagcaaggcccagagaaaacaaatgtggatattgaaaaggtcatgattacagacgaagaggaaatcaggaccaccaatcccgtggctacggagcagtatggttctgtatctaccaacctccagagcggcaacacacaagcagctaccgcagatgtcaacacacaaggcgttcttccaggcatggtctggcaagacagagacgtgtacctgcaggggcctatttgggcaaagattccacacacggacggacattttcacccctctcccctcatgggcggatttggacttaaacaccctcctccacagattctcatcaagaacaccccggtacctgcgaatccttcgaccaccttcagtgcggcaaagtttgcttccttcattacacagtactccacggggcaggtcagcgtggagatcgagtgggagctgcagaaggagaacagcaaacgctggaatcccgagatccagtacacttccaactacaacaagtctgttaatgtggactttactgtggacactaatggcgtgtattcagagcctcgccccattggcaccagatacctgactcgtaatctgtaa

SEQ ID NO: 256 - protein, 735 aa, Adeno-associated virus
MAADGYLPDWLEDTLSEGIRQWWKLKPGPPPPKPAERHKDDSRGLVLPGYKYLGPFNGLDKGEPVNEADAAALEHDKAYDRQLDSGDNPYLKYNHADAEFQERLKEDTSFGGNLGRAVFQAKKRVLEPLGLVEEPVKTAPGKKRPVEHSPAEPDSSSGTGKSGNQPARKRLNFGQTGDSDSVPDPQPLGQPPAAPSGLGTNTMATGSGAPMADNNEGADGVGNSSGNWHCDSTWMGDRVITTSTRTWALPTYNNHLYKQISSQSGASNDNHYFGYSTPWGYFDFNRFHCHFSPRDWQRLINNNWGFRPKRLNFKLFNIQVKEVTQNDGTTTIANNLTSTVQVFTDSEYQLPYVLGSAHQGCLPPFPADVFMVPQYGYLTLNNGSQAVGRSSFYCLGYFPSQMLRTGNNFTFSYTFEDVPFHSSYAHSQSLDRLMNPLIDQYLYYLSRTNTPSGTTTQSRLQFSQAGASDIRDQSRNWLPGPCYRQQRVSKTSADNNNSEYSWTGATKYHLNGRDSLVNPGPAMASHKDDEEKFFPQSGVLIFGKQGPEKTNVDIEKVMITDEEEIRTTNPVATEQYGSVSTNLQSGNTQAATADVNTQGVLPGMVWQDRDVYLQGPIWAKIPHTDGHFHPSPLMGGFGLKHPPPQILIKNTPVPANPSTTFSAAKFASFITQYSTGQVSVEIEWELQKENSKRWNPEIQYTSNYNKSVNVDFTVDTNGVYSEPRPIGTRYLTRNL

SEQ ID NO: 257 - protein, 735 aa, Adeno-associated virus
MAADGYLPDWLEDTLSEGIRQWWKLKPGPPPPKPAERHKDDSRGLVLPGYKYLGPFNGLDKGEPVNEADAAALEHDKAYDRQLDSGDNPYLKYNHADAEFQERLKEDTSFGGNLGRAVFQAKKRVLEPLGLVEEPVKTAPGKKRPVEHSPAEPDSSSGTGKSGNQPARKRLNFGQTGDSDSVPDPQPLGQPPAAPSGLGTNTMATGSGAPMADNNEGADGVGNSSGNWHCDSTWMGDRVITTSTRTWALPTYNNHLYKQISSQSGASNDNHYFGYSTPWGYFDFNRFHCHFSPRDWQRLINNNWGFRPKRLNFKLFNIQVKEVTQNDGTTTIANNLTSTVQVFTDSEYQLPYVLGSAHQGCLPPFPADVFMVPQYGYLTLNNGSQAVGRSSFYCLEYFPSQMLRTGNNFTFSYTFEDVPFHSSYAHSQSLDRLMNPLIDQYLYYLSRTNTPSGTTTQSRLQFSQAGASDIRDQSRNWLPGPCYRQQRVSKTSADNNNSEYSWTGATKYHLNGRDSLVNPGPAMASHKDDEEKFFPQSGVLIFGKQGPEKTNVDIEKVMITDEEEIRTTNPVATEQYGSVSTNLQSGNTQAATADVNTQGVLPGMVWQDRDVYLQGPIWAKIPHTDGHFHPSPLMGGFGLKHPPPQILIKNTPVPANPSTTFSAAKFASFITQYSTGQVSVEIEWELQKENSKRWNPEIQYTSNYNKSVNVDFTVDTNGVYSEPRPIGTRYLTRNL

SEQ ID NO: 258 - protein, 735 aa, Adeno-associated virus; identical to SEQ ID NO: 257

SEQ ID NO: 259 - DNA, 2211 bp, Adeno-associated virus
  source 1..2211: mol_type = unassigned DNA
atggctgccgatggttatcttccagattggctcgaggacactctctctgaaggaataagacagtggtggaagctcaaacctggcccaccaccaccaaagcccgcagagcggcataaggacgacagcaggggtcttgtgcttcctgggtacaagtacctcggacccttcaacggactcgacaagggggagccggtcaacgaggcagacgccgcggccctcgagcacgacaaggcctacgaccggcagctcgacagcggagacaacccgtacctcaagtacaaccacgccgacgcagagtttcaggagcgccttaaagaagatacgtcttttgggggcaacctcggacgagcagtcttccaggcgaaaaagagggttcttgaacctctgcggcctggtttgaggaaacctgttaagacggctccgggaaaaaagaggccggtagagcactctcctgtggagccagactcctcctcgggaaccggaaaagcgggccagcagcctgcaagaaaaagattaaattttggtcagactggagacgcagactccgtacctgacccccagcctctcggacagccaccagcagccccctctggtctgggatctactacaatggctacaggcagtggcgcaccaatggcagacaataacgagggtgccgatggagtgggtaattcctcaggaaattggcattgcgattcccaatggctggacgacagagtcatcgccaccagcacccgaacctgggccctgcccacatacaacaaccacctctacaagcaaatctccagccaatcaggagcctgcaacgacaaccactactttggctacagcaccccctgggggtattttgacttcaacagattccactgccacttttcaccacgtgactggcaaagactcatcaacagcaactggggattccggcccaaaagactcaacttcaagctctttaatattcaagtcaaagaggtcacgcagaatgacggtacgacgacgattgccaataaccttaccagcacggttcaggtgtttactgactcggagtaccagctcccgtacgtcccgggctcggcgcatcaaggatgcctcccgccgtttccagcggacgtcttcatggtcccacagtatggatacctcaccctgaacaacgggagtcaggcggtaggacgctcttccttttactgcctggagtactttccttctcagatgctgcgtactggaaacaactttcagttcagctacacttttgaagacgtgcctttccacagcagctacgctcactgccagagtctggatcggctgatgaatcctctgatcgaccagtacctgtattatctgaacaagacacaaacaaatagtggaactcttcagcagtctcggctactgtttagccaagctggaccaaccaacatgtctcttcaagctaaaaactggctgcctggaccttgctacagacagcagcgtctgtcaaaacaggcaaacgacaataacaactgcaactttccctggactgcagctacaaagtatcatctaaatggccgggactcgttggttaatccaggaccagctatggccagtcacaaggatgacgaagaaaagtttttccccatgcatggaaccctgatatttggtaaacaaggaacaaatgccaacgacgcggatttggaaaatgtcatgattacagatgaagaagaaatcaggcccaccaatcccgtggctacggagcagtacgggactgtgtcaaataatttgcaaaactcaaacactggtccaactacaggaactgtcaatcaccaaggagcgttacctggtatggtgtggcaggatcgagacgtgtacctgcagggacccatttgggccaagattcctcacaccgatggacactttcatccttctccactgatgggaggttttggactcaaacacccgcctcctcagatcatgatcaaaagcactcccgttccagccaatcctcccacaaacttcagttctgccaagtttgcttcttccatcacacagtattccacgggacaggtcagcgtggagatcgagtgggagctgcagaaggagaacagcaaacgctggaatcccgaaattcagtacacttccaactacaacaagtctgttaatgtggactttactgtggacactaatggtgtgtattcagagcctcgccccattggcaccagatacctgactcgtaatctgtaa

SEQ ID NO: 260 - protein, 736 aa, Adeno-associated virus
MAADGYLPDWLEDTLSEGIRQWWKLKPGPPPPKPAERHKDDSRGLVLPGYKYLGPFNGLDKGEPVNEADAAALEHDKAYDRQLDSGDNPYLKYNHADAEFQERLKEDTSFGGNLGRAVFQAKKRVLEPLRPGLRKPVKTAPGKKRPVEHSPVEPDSSSGTGKAGQQPARKRLNFGQTGDADSVPDPQPLGQPPAAPSGLGSTTMATGSGAPMADNNEGADGVGNSSGNWHCDSQWLDDRVIATSTRTWALPTYNNHLYKQISSQSGACNDNHYFGYSTPWGYFDFNRFHCHFSPRDWQRLINSNWGFRPKRLNFKLFNIQVKEVTQNDGTTTIANNLTSTVQVFTDSEYQLPYVPGSAHQGCLPPFPADVFMVPQYGYLTLNNGSQAVGRSSFYCLEYFPSQMLRTGNNFQFSYTFEDVPFHSSYAHCQSLDRLMNPLIDQYLYYLNKTQTNSGTLQQSRLLFSQAGPTNMSLQAKNWLPGPCYRQQRLSKQANDNNNCNFPWTAATKYHLNGRDSLVNPGPAMASHKDDEEKFFPMHGTLIFGKQGTNANDADLENVMITDEEEIRPTNPVATEQYGTVSNNLQNSNTGPTTGTVNHQGALPGMVWQDRDVYLQGPIWAKIPHTDGHFHPSPLMGGFGLKHPPPQIMIKSTPVPANPPTNFSSAKFASSITQYSTGQVSVEIEWELQKENSKRWNPEIQYTSNYNKSVNVDFTVDTNGVYSEPRPIGTRYLTRNL

SEQ ID NO: 261 - DNA, 2208 bp, Adeno-associated virus
  source 1..2208: mol_type = unassigned DNA
atggctgccgatggttatcttccagattggctcgaggacactctctctgaaggaataagacagtggtggaagctcaaacctggcccaccaccaccaaagcccgcagagcggcataaggacgacagcaggggtcttgtgcttcctgggtacaagtacctcggacccttcaacggactcgacaagggagagccggtcaacgaggcagacgccgcggccctcgagcacgacaaggcctacgaccggcagctcgacagcggagacaacccgtacctcaagtacaaccacgccgacgcggagtttcaggagcgccttaaagaggatacgtcttttgggggcaacctcggacgagcagtcttccaggcaaaaaagagggttctggaacctctgggcctggttgaggagcctgttaagacggctccgggaaaaaagaggccggtagagcactctcctgcagagccagattcctcctccggaactggaaagtcgggcaaccagcctgcaagaaagagattgaatttcggtcagactggagactcagactccgtacctgacccccagcctctcggacagccaccagcagccccctctggtctgggaactaatacgatggctacaggcagtggcgcaccaatggcagacaataacgagggcgccgacggagtgggtaattcctcgggaaattggcattgcgattccacatggatgggcgacagagtcatcaccaccagcacccgaacctgggccctgcccacctacaacaaccatctgtacaagcaaatatccagccagtctggagccagcaacgacaatcactactttggctacagcaccccctgggggtattttgacttcaacagattccactgccacttttcaccacgtgactggcaaagactcatcaacaacaactggggattccgacccaagagactcaacttcaagctctttaacattcaagtcaaagaggtcacgcagaatgacggtacgacgacgattgccaataaccttaccagcacggttcaggtgtttactgactcggagtaccagctcccgtacgtcctcggctcggcgcatcaaggatgcctcccgccgttcccagcagacgtcttcatggtgccacagtatggatacctcaccctgaacaacgggagtcaggcagtaggacgctcttcattttactgcctagagtactttccttctcagatgctgcgtaccggaaacagctttaccttcagctacacctttgaggacgttcctttccacagcagctacgctcacagccagagtttggaccgtctcatgaatcctctcatcgaccagtacctgtattacttgagcagaacaaacactccaagcggaaccaccacgcagtccaggcttcagttttctcaggccggagcgagtgacattcgggaccagtctaggaactggcttcctggaccctgttaccgtcagcagcgagtatcaaagacatctgcggataacaacaacagtgaatactcgtggactggagctaccaagtaccacctcaatggcagagactctctggtgaatccgggcccggccatggccagccacaaagacgatgaagaaaagttctttcctcagagcggggttcttatctttgggaagcaaggctcagagaaaacaaatgtggatattgaaaaggtcatgattacagacgaagaggaaatcaggaccaccaatcccgtggctacggagcagtatggttctgtatctaccaacctccagagcggcaacacacaagcagctaccgcagatgtcaacacacaaggcgttcttccaggcatggtctggcaagacagagacgtgtacctgcaggggcctatttgggcaaagattccacacacggacggacattttcacccctctcccctcatgggcggatttggacttaaacaccctcctccacagattctcatcaagaacaccccggtacctgcgaatccttcgaccaccttcagtgcggcaaagtttgcttccttcattacacagtactccacggggcaggtcagcgtggagatcgagtgggagctgcagaaggagaacagcaaacgctggaatcccgagatccagtacacttccaactacaacaagtctgttaatgtggactttactgtggacactaatggcgtgtattcagagcctcgccccattggcaccagatacctgactcgtaatctgtaa

SEQ ID NO: 262 - protein, 735 aa, Adeno-associated virus
MAADGYLPDWLEDTLSEGIRQWWKLKPGPPPPKPAERHKDDSRGLVLPGYKYLGPFNGLDKGEPVNEADAAALEHDKAYDRQLDSGDNPYLKYNHADAEFQERLKEDTSFGGNLGRAVFQAKKRVLEPLGLVEEPVKTAPGKKRPVEHSPAEPDSSSGTGKSGNQPARKRLNFGQTGDSDSVPDPQPLGQPPAAPSGLGTNTMATGSGAPMADNNEGADGVGNSSGNWHCDSTWMGDRVITTSTRTWALPTYNNHLYKQISSQSGASNDNHYFGYSTPWGYFDFNRFHCHFSPRDWQRLINNNWGFRPKRLNFKLFNIQVKEVTQNDGTTTIANNLTSTVQVFTDSEYQLPYVLGSAHQGCLPPFPADVFMVPQYGYLTLNNGSQAVGRSSFYCLEYFPSQMLRTGNSFTFSYTFEDVPFHSSYAHSQSLDRLMNPLIDQYLYYLSRTNTPSGTTTQSRLQFSQAGASDIRDQSRNWLPGPCYRQQRVSKTSADNNNSEYSWTGATKYHLNGRDSLVNPGPAMASHKDDEEKFFPQSGVLIFGKQGSEKTNVDIEKVMITDEEEIRTTNPVATEQYGSVSTNLQSGNTQAATADVNTQGVLPGMVWQDRDVYLQGPIWAKIPHTDGHFHPSPLMGGFGLKHPPPQILIKNTPVPANPSTTFSAAKFASFITQYSTGQVSVEIEWELQKENSKRWNPEIQYTSNYNKSVNVDFTVDTNGVYSEPRPIGTRYLTRNL

SEQ ID NO: 263 - DNA, 2211 bp, Adeno-associated virus; identical to SEQ ID NO: 153
  source 1..2211: mol_type = unassigned DNA

SEQ ID NO: 264 - protein, 736 aa, Adeno-associated virus
MAADGYLPDWLEDTLSEGIRQWWKLKPGPPPPKPAERHKDDSRGLVLPGYKYLGPGNGLDKGEPVNAADAAALEHDKAYDQQLKAGDNPYLKYNHADAEFQERLKEDTSFGGNLGRAVFQAKKRLLEPLGLVEEAAKTAPGKKRPVEQSPQEPDSSAGIGKSGSQPAKKKLNFGQTGDTESVPDPQPIGEPPAAPSGVGSLTMASGGGAPVADNNEGADGVGSSSGNWHCDSQWLGDRVITTSTRTWALPTYNNHLYKQISNSTSGGSSNDNAYFGYSTPWGYFDFNRFHCHFSPRDWQRLINNNWGFRPKRLNFKLFNIQVKEVTDNNGVKTIANNLTSTVQVFTDSDYQLPYVLGSAHEGCLPPFPADVFMIPQYGYLTLNDGGQAVGRSSFYCLEYFPSQMLRTGNNFQFSYEFENVPFHSSYAHSQSLDRLMNPLIDQYLYYLSKTINGSGQNQQTLKFSVAGPSNMAVQGRNYIPGPSYRQQRVSTTVTQNNNSEFAWPGASSWALNGRNSLMNPGPAMASHKEGEDRFFPLSGSLIFGKQGTGRDNVDADKVMITNEEEIKTTNPVATESYGQVATNHQSAQAQAQTGWVQNQGILPGMVWQDRDVYLQGPIWAKIPHTDGNFHPSPLMGGFGMKHPPPQILIKNTPVPADPPTAFNKDKLNSFITQYSTGQVSVEIEWELQKENSKRWNPEIQYTSNYYKSNNVEFAVSTEGVYSEPRPIGTRYLTRNL

SEQ ID NO: 265 - DNA, 2211 bp, Adeno-associated virus
  source 1..2211: mol_type = unassigned DNA
atggctgccgatggttatcttccagattggctcgaggacactctctctgaaggaataagacagtggtggaagctcaaacctggcccaccaccaccaaagcccgcagagcggcataaggacgacagcaggggtcttgtgcttcctgggtacaagtacctcggacccggcaacggactcgacaagggggagccggtcaacgcagcagacgcggcggccctcgagcacgacaaggcctacgaccagcagctcaaggccggagacaacccgtacctcaagtacaaccacgccgacgccgagttccaggagcggctcaaagaagatacgtcttttgggggcaacctcgggcgagcagtcttccaggccaaaaagaggcttcttgaacctcttggtctggttgaggaagcggctaagacggctcctggaaagaagaggcctgtagagcagtctcctcaggaaccggactcctccgcgggtattggcaaatcgggttcacagcccgctaaaaagaaactcaatttcggtcagactggcgacacagagtcagtccccgaccctcaaccaatcggagaacctcccgcagccccctcaggtgtgggatctcttacaatggcttcaggtggtggcgcaccagtggcagacaataacgaaggtgccgatggagtgggtagttcctcgggaaattggcattgcgattcccaatggctgggggacagagtcatcaccaccagcacccgaacctgggccctgcccacctacaacaatcacctctacaagcaaatctccaacagcacatctggaggatcttcaaatgacaacgcctacttcggctacagcaccccctgggggtattttgacttcaacagattccactgccacttctcaccacgtgactggcagcgactcatcaacaacaactggggattccggcctaagcgactcaacttcaagctcttcaacattcaggtcaaagaggttacggacaacaatggagtcaagaccatcgccaataaccttaccagcacggtccaggtcttcacggactcagactatcagctcccgtacgtgctcgggtcggctcacgagggctgcctcccgccgttcccagcggacgttttcatgattcctcagtacgggtatctgacgcttaatgatgggagccaggccgtgggtcgttcgtccttttactgcctggaatatttcccgtcgcaaatgctaagaacgggtaacaacttccagttcagctacgagtttgagaacgtacctttccatagcagctacgctcacagccaaagcctggaccgactaatgaatccactcatcgaccaatacttgtactatctctcaaagactattaacggttctggacagaatcaacaaacgctaaaattcagcgtggccggacccagcaacatggctgtccagggaagaaactacatacctggacccagctaccgacaacaacgtgtctcaaccactgtgactcaaaacaacaacagcgaatttgcttggcctggagcttcttcttgggctctcaatggacgtaatagcttgatgaatcctggacctgctatggccagccacaaagaaggagaggaccgtttctttcctttgtctggatctttaatttttggcaaacaaggaactggaagagacaacgtggatgcggacaaagtcatgataaccaacgaagaagaaattaaaactactaacccggtagcaacggagtcctatggacaagtggccacaaaccaccagagtgcccaagcacaggcgcagaccggctgggttcaaaaccaaggaatacttccgggtatggtttggcaggacagagatgtgtacctgcaaggacccatttgggccaaaattcctcacacggacggcaactttcacccttctccgctaatgggagggtttggaatgaagcacccgcctcctcagatcctcatcaaaaacacacctgtacctgcggatcctccaacggctttcaataaggacaagctgaactctttcatcacccagtattctactggccaagtcagcgtggagattgagtgggagctgcagaaggaaaacagcaagcgctggaacccggagatccagtacacttccaactattacaagtctaataatgttgaatttgctgttaatactgaaggtgtatatagtgaaccccgccccattggcaccagatacctgactcgtaatctgtaa

SEQ ID NO: 266 - protein, 736 aa, Adeno-associated virus
MAADGYLPDWLEDTLSEGIRQWWKLKPGPPPPKPAERHKDDSRGLVLPGYKYLGPGNGLDKGEPVNAADAAALEHDKAYDQQLKAGDNPYLKYNHADAEFQERLKEDTSFGGNLGRAVFQAKKRLLEPLGLVEEAAKTAPGKKRPVEQSPQEPDSSAGIGKSGSQPAKKKLNFGQTGDTESVPDPQPIGEPPAAPSGVGSLTMASGGGAPVADNNEGADGVGSSSGNWHCDSQWLGDRVITTSTRTWALPTYNNHLYKQISNSTSGGSSNDNAYFGYSTPWGYFDFNRFHCHFSPRDWQRLINNNWGFRPKRLNFKLFNIQVKEVTDNNGVKTIANNLTSTVQVFTDSDYQLPYVLGSAHEGCLPPFPADVFMIPQYGYLTLNDGSQAVGRSSFYCLEYFPSQMLRTGNNFQFSYEFENVPFHSSYAHSQSLDRLMNPLIDQYLYYLSKTINGSGQNQQTLKFSVAGPSNMAVQGRNYIPGPSYRQQRVSTTVTQNNNSEFAWPGASSWALNGRNSLMNPGPAMASHKEGEDRFFPLSGSLIFGKQGTGRDNVDADKVMITNEEEIKTTNPVATESYGQVATNHQSAQAQAQTGWVQNQGILPGMVWQDRDVYLQGPIWAKIPHTDGNFHPSPLMGGFGMKHPPPQILIKNTPVPADPPTAFNKDKLNSFITQYSTGQVSVEIEWELQKENSKRWNPEIQYTSNYYKSNNVEFAVNTEGVYSEPRPIGTRYLTRNL

SEQ ID NO: 267 - DNA, 2208 bp, Adeno-associated virus
  source 1..2208: mol_type = unassigned DNA
atggctgccgatggttatcttccagattggctcgaggacactctctctgaaggaataagacagcggtggaagctcaaacctggcccaccaccaccagagcccgcagagcggcataaggacgacagcaggggtcttgtgcttcctgggtacaagtacctcggacccttcaacggactcgacaagggagagccggtcaacgaggcagacgccgcggccctcgagcacgacaaagcctacgaccggcagctcgacagcggagacaacccgtacctcaagtacaaccacgccgacgcggagtttcaggagcgccttaaagaagatacgtcttttgggggcaacctcggacgagcagtcttccaggcgaaaaagagggtacttgaacctctgggcctggttgaggaacctgttaagacggctccgggaaaaaagaggccggtagagcactctcctgtggagccagactcctcctcgggaaccggaaaggcgggccagcagcctgcaagaaaaagattgaattttggtcagactggagacgcagactcagtacctgacccccagcctctcggacagccaccagcagccccctctggtctgggaactaatacgatggctacaggcagtggcgcaccaatggcagacaataacgagggcgccgacggagtgggtaattcctcgggaaattggcattgcgattccacatggatgggcgacagagtcatcaccaccagcacccgaacctgggccctgcccacctacaacaaccacctctacaaacaaatttccagccaatcaggagcctcgaacgacaatcactactttggctacagcaccccttgggggtattttgacttcaacagattccactgccacttttcaccacgtgactggcaaagactcatcaacaacaactggggattccgacccaagagactcaacttcaagctctttaacattcaagtcaaagaggtcacgcagaatgacggtacgacgacgattgccaataaccttaccggcacggttcaggtgtttactgactcggagtaccagctcccgtacgtcctcggctcggcgcatcaaggatgcctcccgccgttcccagcagacgtcttcatggtgccacagtatggatacctcaccctgaacaacgggagtcaggcagtaggacgctcttcattttactgcctggagtactttccttctcagatgctgcgtaccggaaacaactttaccttcagctacacttttgaggacgttcctttccacagcagctacgctcacagccagagtctgggccgtctcatgaatcctctcatcgaccagtacctgtattacttgagcagaacaaacactccaagtggaaccaccacgcagtcaaggcttcagttttctcaggccggagcgagtgacattcgggaccagtctaggaactggcttcctggaccctgttaccgccagcagcgagtatcaaagacatctgcggataacaacaacagtgaatactcgtggactggagctaccaagtaccacctcaatggcagagactctctggtgaatccgggcccggccatggcaagccacaaggacgatgaagaaaagttttttcctcagagcggggttctcatctttgggaagcaaggctcagagaaaacaaatgtggacattgaaaaggtcatgattacagacgaagaggaaatcaggacaaccaatcccgtggctacggagcagtatggttctgtatctaccaacctccagagaggcaacagacaagcagctaccgcagatgtcaacacacaaggcgttcttccaggcatggtctggcaggacagagatgtgtaccttcaggggcccatctgggcaaagattccacacacggacggacattttcacccctctcccctcatgggtggattcggacttaaacaccctcctccacagattctcatcaagaacaccccggtacctgcgaatccttcgaccaccttcagtgcggcaaagtttgcttccttcatcacacagtactccacgggacaggtcagcgtggagatcgagtgggagctgcagaaggaaaacagcaaacgctggaatcccgaaattcagtacacttccaactacaacaagtctgttaatgtggactttactgtggacactaatggcgtgtattcagagcctcgccccattggcaccagatacctgactcgtaatctgtaa

SEQ ID NO: 268 - protein, 735 aa, Adeno-associated virus
MAADGYLPDWLEDTLSEGIRQRWKLKPGPPPPEPAERHKDDSRGLVLPGYKYLGPFNGLDKGEPVNEADAAALEHDKAYDRQLDSGDNPYLKYNHADAEFQERLKEDTSFGGNLGRAVFQAKKRVLEPLGLVEEPVKTAPGKKRPVEHSPVEPDSSSGTGKAGQQPARKRLNFGQTGDADSVPDPQPLGQPPAAPSGLGTNTMATGSGAPMADNNEGADGVGNSSGNWHCDSTWMGDRVITTSTRTWALPTYNNHLYKQISSQSGASNDNHYFGYSTPWGYFDFNRFHCHFSPRDWQRLINNNWGFRPKRLNFKLFNIQVKEVTQNDGTTTIANNLTGTVQVFTDSEYQLPYVLGSAHQGCLPPFPADVFMVPQYGYLTLNNGSQAVGRSSFYCLEYFPSQMLRTGNNFTFSYTFEDVPFHSSYAHSQSLGRLMNPLIDQYLYYLSRTNTPSGTTTQSRLQFSQAGASDIRDQSRNWLPGPCYRQQRVSKTSADNNNSEYSWTGATKYHLNGRDSLVNPGPAMASHKDDEEKFFPQSGVLIFGKQGSEKTNVDIEKVMITDEEEIRTTNPVATEQYGSVSTNLQRGNRQAATADVNTQGVLPGMVWQDRDVYLQGPIWAKIPHTDGHFHPSPLMGGFGLKHPPPQILIKNTPVPANPSTTFSAAKFASFITQYSTGQVSVEIEWELQKENSKRWNPEIQYTSNYNKSVNVDFTVDTNGVYSEPRPIGTRYLTRNL

SEQ ID NO: 269 - DNA, 2208 bp, Adeno-associated virus
  source 1..2208: mol_type = unassigned DNA
atggctgccgatggttatcttccagattggctcgaggacactctctctgaaggaataagacagcggtggaagctcaaacctggcccaccaccaccagagcccgcagagcggcataaggacgacagcaggggtcttgtgcttcctgggtacaagtacctcggacccttcaacggactcgacaagggagagccggtcaacgaggcagacgccgcggccctcgagcacgacaaagcctacgaccggcagctcgacagcggagacaacccgtacctcaagtacaaccacgccgacgcggagtttcaggagcgccttaaagaagatacgtcctttgggggcaacctcggacgagcagtcttccaggcgaaaaagagggtacttgaacctctgggcctggttgaggaacctgttaagacggctccgggaaaaaagaggccggtagagcactctcctgtggagccagactcctcctcgggaaccggaaaggcgggccagcagcctgcaagaaaaagattgaattttggtcagactggagacgcagactcagtacctgacccccagcctctcggacagccaccagcagccccctctggtctgggaactaatacgatggctacaggcagtggcgcaccaatggcagacaataacgagggcgccgacggagtgggtaattcctcgggaaattggcattgcgattccacatggatgggcgacagagtcatcaccaccagcacccgaacctgggccctgcccacctacaacaaccacctctacaaacaaatttccagccaatcaggagcctcgaacgacaatcactactttggctacagcaccccttgggggtattttgacttcaacagattccactgccacttttcaccacgtgactggcaaagactcatcaacaacaactggggattccgacccaagagactcaacttcaagctctttaacattcaagtcaaagaggtcacgcagaatgacggtacgacgacgattgccaataaccttaccagcacggttcaggtgtttactgactcggagtaccagctcccgtacgtcctcggctcggcgcatcaaggatgcctcccgccgttcccagcagacgtcttcatggtgccacagtatggatacctcaccctgaacaacgagagtcaggcagtaggacgctcttcattttactgcctggagtactttccttctcagatgctgcgtaccggaaacaactttaccttcagctacacttttgaggacgttcctttccacagcagctacgctcacagccagagtctgggccgtctcatgaatcctctcatcgaccagtacctgtattacttgagcagaacaaacactccaagtggaaccaccacgcagtcaaggcttcagttttctcaggccggagcgagtgacattcgggaccagtctaggaactggcttcctggaccctgttaccgccagcagcgagtatcaaagacatctgcggataacaacaacagtgaatactcgtggactggagctaccaagtaccacctcaatggcagagactctctggtgaatccgggcccggccatggcaagccacaaggacgatgaagaaaagttttttcctcagagcggggttctcatctttgggaagcaaggctcagagaaaacaaatgtggacattgaaaaggtcatgattacagacgaagaggaaatcaggacaaccaatcccgtggctacggagcagtatggttctgtatctaccaacctccagagaggcaacagacaagcagctaccgcagatgtcaacacacaaggcgttcttccaggcatggtctggcaggacagagatgtgtaccttcaggggcccatctgggcaaagattccacacacggacggacattttcacccctctcccctcatgggtggattcggacttaaacaccctcctccacagattctcatcaagaacaccccggtacctgcgaatccttcgaccaccttcagtgcggcaaagtttgcttccttcatcacacagtactccacgggacaggtcagcgtggagatcgagtgggagctgcagaaggaaaacagcaaacgctggaatcccgaaattcagtacacttccaactacaacaagtctgttaatgtggactttactgtggacactaatggcgtgtattcagagcctcgccccattggcaccagatacctgactcgtaatctgtaa

SEQ ID NO: 270 - protein, 735 aa, Adeno-associated virus
MAADGYLPDWLEDTLSEGIRQRWKLKPGPPPPEPAERHKDDSRGLVLPGYKYLGPFNGLDKGEPVNEADAAALEHDKAYDRQLDSGDNPYLKYNHADAEFQERLKEDTSFGGNLGRAVFQAKKRVLEPLGLVEEPVKTAPGKKRPVEHSPVEPDSSSGTGKAGQQPARKRLNFGQTGDADSVPDPQPLGQPPAAPSGLGTNTMATGSGAPMADNNEGADGVGNSSGNWHCDSTWMGDRVITTSTRTWALPTYNNHLYKQISSQSGASNDNHYFGYSTPWGYFDFNRFHCHFSPRDWQRLINNNWGFRPKRLNFKLFNIQVKEVTQNDGTTTIANNLTSTVQVFTDSEYQLPYVLGSAHQGCLPPFPADVFMVPQYGYLTLNNESQAVGRSSFYCLEYFPSQMLRTGNNFTFSYTFEDVPFHSSYAHSQSLGRLMNPLIDQYLYYLSRTNTPSGTTTQSRLQFSQAGASDIRDQSRNWLPGPCYRQQRVSKTSADNNNSEYSWTGATKYHLNGRDSLVNPGPAMASHKDDEEKFFPQSGVLIFGKQGSEKTNVDIEKVMITDEEEIRTTNPVATEQYGSVSTNLQRGNRQAATADVNTQGVLPGMVWQDRDVYLQGPIWAKIPHTDGHFHPSPLMGGFGLKHPPPQILIKNTPVPANPSTTFSAAKFASFITQYSTGQVSVEIEWELQKENSKRWNPEIQYTSNYNKSVNVDFTVDTNGVYSEPRPIGTRYLTRNL

SEQ ID NO: 271 - DNA, 2208 bp, Adeno-associated virus
  source 1..2208: mol_type = unassigned DNA
atggctgccgatggttatcttccagattggctcgaggacactctctctgaaggaataagacagcggtggaagctcaaacctggcccaccaccaccagagcccgcagagcggcataaggacgacagcaggggtcttgtgcttcctgggtacaagtacctcggacccttcaacggactcgacaagggagagccggtcaacgaggcagacgccgcggccctcgagcacgacaaagcctacgaccggcagctcgacagcggagacaacccgtacctcaagtacaaccacgccgacgcggagtttcaggagcgccttaaagaagatacgtcttttgggggcaacctcggacgagcagtcttccaggcgaaaaagagggtacttgaacctctgggcctggttgaggaacctgttaagacggctccgggaaaaaagaggccggtagagcactctcctgtggagccagactcctcctcgggaaccggaaaggcgggccagcagcctgcaagaaaaagattgaattttggtcagactggagacgcagactcagtacctgacccccagcctctcggacagccaccagcagccccctctggtctgggaactaatacgatggctacaggcagtggcgcaccaatggcagacaataacgagggcgccgacggagtgggtaattcctcgggaaattggcattgcgattccacatggatgggcgacagagtcatcaccaccagcacccgaacctgggccctgcccacctacaacaaccacctctacaaacaaatttccagccaatcaggagcctcgaacgacaatcactactttggctacagcaccccttgggggtattttgacttcaacagattccactgccacttttcaccacgtgactggcaaagactcatcaacaacaactggggattccgacccaagagactcaacttcaagctctttaacattcaagtcaaagaggtcacgcagaatgacggtacgacgacgattgccaataaccttaccagcacggttcaggtgtttactgactcggagtaccagctcccgtacgtcctcggctcggcgcatcaaggatgcctcccgccgttcccagcagacgtcttcatggtaccacagtatggatacctcaccctgaacaacgggagtcaggcagtaggacgctcttcattttactgcctggagtactttccttctcagatgctgcgtaccggaaacaactttaccttcagctacacttttgaggacgttcctttccacagcagctacgctcacagccagagtctgggccgtctcatgaatcctctcatcgaccagtacctgtattacttgagcagaacaaacactccaagtggaaccaccacgcagtcaaggcttcagttttctcaggccggagcgagtgacattcgggaccagtctaggaactggcttcctggaccctgttaccgccagcagcgagtatcaaagacatctgcggataacaacaacagtgaatactcgtggactggagctaccaagtaccacctcaatggcagagactctctggtgaatccgggcccggccatggcaagccacaaggacgatgaagaaaagttttttcctcagagcggggttctcatctttgggaagcaaggctcagagaaaacaaatgtggacattgaaaaggtcatgattacagacgaagaggaaatcaggacaaccaatcccgtggctacggagcagtatggttctgtatctaccaacctccagagaggcaacagacaagcagctaccgcagatgtcaacacacaaggcgttcttccaggcatggtctggcaggacagagatgtgtaccttcaggggcccatctgggcaaagattccacacacggacggacattttcacccctctcccctcatgggtggattcggacttaaacaccctcctccacagattctcatcaagaacaccccggtacctgcgaatccttcgaccaccttcagtgcggcaaagtttgcttccttcatcacacagtactccacgggacaggtcagcgtggagatcgagtgggagctgcagaaggaaaacagcaaacgctggaatcccgaaattcagtacacttccaactacaacaagtctgttaatgtggactttactgtggacactaatggcgtgtattcagagcctcgccccattggcaccagatacctgactcgtaatctgtaa

SEQ ID NO: 272 - protein, 735 aa, Adeno-associated virus
MAADGYLPDWLEDTLSEGIRQRWKLKPGPPPPEPAERHKDDSRGLVLPGYKYLGPFNGLDKGEPVNEADAAALEHDKAYDRQLDSGDNPYLKYNHADAEFQERLKEDTSFGGNLGRAVFQAKKRVLEPLGLVEEPVKTAPGKKRPVEHSPVEPDSSSGTGKAGQQPARKRLNFGQTGDADSVPDPQPLGQPPAAPSGLGTNTMATGSGAPMADNNEGADGVGNSSGNWHCDSTWMGDRVITTSTRTWALPTYNNHLYKQISSQSGASNDNHYFGYSTPWGYFDFNRFHCHFSPRDWQRLINNNWGFRPKRLNFKLFNIQVKEVTQNDGTTTIANNLTSTVQVFTDSEYQLPYVLGSAHQGCLPPFPADVFMVPQYGYLTLNNGSQAVGRSSFYCLEYFPSQMLRTGNNFTFSYTFEDVPFHSSYAHSQSLGRLMNPLIDQYLYYLSRTNTPSGTTTQSRLQFSQAGASDIRDQSRNWLPGPCYRQQRVSKTSADNNNSEYSWTGATKYHLNGRDSLVNPGPAMASHKDDEEKFFPQSGVLIFGKQGSEKTNVDIEKVMITDEEEIRTTNPVATEQYGSVSTNLQRGNRQAATADVNTQGVLPGMVWQDRDVYLQGPIWAKIPHTDGHFHPSPLMGGFGLKHPPPQILIKNTPVPANPSTTFSAAKFASFITQYSTGQVSVEIEWELQKENSKRWNPEIQYTSNYNKSVNVDFTVDTNGVYSEPRPIGTRYLTRNL

SEQ ID NO: 273 - DNA, 2208 bp, Adeno-associated virus
  source 1..2208: mol_type = unassigned DNA
atggctgccgatggttatcttccagattggctcgaggacactctctctgaaggaataagacagcggtggaagctcaaacctggcccaccaccaccagagcccgcagagcggcataaggacgacagcaggggtcttgtgcttcctgggtacaagtacctcggacccttcaacggactcgacaagggagagccggtcaacgaggcagacgccgcggccctcgagcacgacaaagcctacgaccggcagctcgacagcggagacaacccgtacctcaagtacaaccacgccgacgcggagtttcaggagcgccttaaagaagatacgtcttttgggggcaacctcggacgagcagtcttccaggcgaaaaagagggtactcgaacctctgggcctggttgaggaacctgttaagacggctccgggaaaaaagaggccggtagagcactctcctgtggagccagactcctcctcgggaaccggaaaggcgggccagcagcctgcaagaaaaagattgaattttggtcagactggagacgcagactcagtacctgacccccagcctctcggacagccaccagcagccccctctggtctgggaactaatacgatggctacaggcagtggcgcaccaatggcagacaataacgagggcgccgacggagtgggtaattcctcgggaaattggcattgcgattccacatggatgggcgacagagtcatcaccaccagcacccgaacctgggccctgcccacctacaacaaccacctctacaaacaaatttccagccaatcaggagcctcgaacgacaatcactactttggctacagcaccccttgggggtattttgacttcaacagattccactgccacttttcaccacgtgactggcaaagactcatcaacaacaactggggattccgacccaagagactcaacttcaagctctttaacattcaagtcaaagaggtcacgcagaatgacggtacgacgacgattgccaataaccttaccagcacggttcaggtgtttactgactcggagtaccagctcccgtacgtcctcggctcggcgcatcaaggatgcctcccgccgttcccagcagacgtcttcatggtgccacagtatggatacctcaccctgaacaacgggagtcaggcagcaggacgctcttcattttactgcctggagtactttccttctcagatgctgcgtaccggaaacaactttaccttcagctacacttttgaggacgttcctttccacagcagctacgctcacagccagagtctgggccgtctcatgaatcctctcatcgaccagtacctgtattacttgagcagaacaaacactccaagtggaaccaccacgcagtcaaggcttcagttttctcaggccggagcgagtgacattcgggaccagtctaggaactggcttcctggaccctgttaccgccagcagcgagtatcaaagacatctgcggataacaacaacagtgaatactcgtggactggagctaccaagtaccacctcaatggcagagactctctggtgaatccgggcccggccatggcaagccacaaggacgatgaagaaaagttttttcctcagagcggggttctcatctttgggaagcaaggctcagagaaaacaaatgtggacattgaaaaggtcatgattacagacgaagaggaaatcaggacaaccaatcccgtggctacggagcagtatggttctgtatctaccaacctccagagaggcaacagacaagcagctaccgcagatgtcaacacacaaggcgttcttccaggcatggtctggcaggacagagatgtgtaccttcaggggcccatctgggcaaagattccacacacggacggacattttcacccctctcccctcatgggtggattcggacttaaacaccctcctccacagattctcatcaagaacaccccggtacctgcgaatccttcgaccaccttcagtgcggcaaagtttgcttccttcatcacacagtactccacgggacaggtcagcgtggagatcgagtgggagctgcagaaggaaaacagcaaacgctggaatcccgaaattcagtacacttccaactacaacaagtccgttaatgtggactttactgtggacactaatggcgtgtattcagagcctcgccccattggcaccagatacctgactcgtaatctgtaa

SEQ ID NO: 274 - protein, 735 aa, Adeno-associated virus
MAADGYLPDWLEDTLSEGIRQRWKLKPGPPPPEPAERHKDDSRGLVLPGYKYLGPFNGLDKGEPVNEADAAALEHDKAYDRQLDSGDNPYLKYNHADAEFQERLKEDTSFGGNLGRAVFQAKKRVLEPLGLVEEPVKTAPGKKRPVEHSPVEPDSSSGTGKAGQQPARKRLNFGQTGDADSVPDPQPLGQPPAAPSGLGTNTMATGSGAPMADNNEGADGVGNSSGNWHCDSTWMGDRVITTSTRTWALPTYNNHLYKQISSQSGASNDNHYFGYSTPWGYFDFNRFHCHFSPRDWQRLINNNWGFRPKRLNFKLFNIQVKEVTQNDGTTTIANNLTSTVQVFTDSEYQLPYVLGSAHQGCLPPFPADVFMVPQYGYLTLNNGSQAAGRSSFYCLEYFPSQMLRTGNNFTFSYTFEDVPFHSSYAHSQSLGRLMNPLIDQYLYYLSRTNTPSGTTTQSRLQFSQAGASDIRDQSRNWLPGPCYRQQRVSKTSADNNNSEYSWTGATKYHLNGRDSLVNPGPAMASHKDDEEKFFPQSGVLIFGKQGSEKTNVDIEKVMITDEEEIRTTNPVATEQYGSVSTNLQRGNRQAATADVNTQGVLPGMVWQDRDVYLQGPIWAKIPHTDGHFHPSPLMGGFGLKHPPPQILIKNTPVPANPSTTFSAAKFASFITQYSTGQVSVEIEWELQKENSKRWNPEIQYTSNYNKSVNVDFTVDTNGVYSEPRPIGTRYLTRNL

SEQ ID NO: 275 - protein, 738 aa, Adeno-associated virus; identical to SEQ ID NO: 117

SEQ ID NO: 276 - DNA, 2217 bp, Adeno-associated virus
  source 1..2217: mol_type = unassigned DNA
atggctgctgacggttatcttccagattggctcgaggacaacctctctgagggcattcgcgagtggtgggacctgaaacctggagcccccaagcccaaggccaaccagcagaagcaggacgacggccggggtctggtgcttcctggctacaagtacctcggacccttcaacggactcgacaagggggagcccgtcaacgcggcggacgcagcggccctcgagcacgacaaggcctacgaccagcagctcaaagcgggtgacaatccgtacctgcggtataaccacgccgacgccgagtttcaggagcgtctgcaagaagatacgtcttttgggggcaacctcgggcgagcagtcttccaggccaagaagcgggttctcgaacctctcggtctggttgaggaagctgctaagacggctcctggaaagaagagaccggtagaaccgtcacctcagcgttcccccgactcctccacgggcatcggcaagaaaggccagcagcccgctaaaaagagactgaactttggtcagactggcgactcagagtcagtccccgaccctcaaccaatcggagaaccaccagcaggcccctctggtctgggatctggtacaatggctgcaggcggtggcgctccaatggcagacaataacgaaggcgccgacggagtgggtagttcctcaggaaattggcattgcgattccacatggctgggcgacagagtcatcaccaccagcacccgaacctgggccctgcccacctacaacaaccacctctacaagcaaatatccaatgggacatcgggaggaagcaccaacgacaacacctacttcggctacagcaccccctgggggtattttgacttcaacagattccactgccacttctcaccacgtgactggcagcgactcatcaacaacaactggggattccggccaaaaagactcagcttcaagctcttcaacatccaggtcaaggaggtcacgcagaatgaaggcaccaagaccatcgccaataaccttaccagcacgattcaggtatttacggactcggaataccagctgccgtacgtcctcggctccgcgcaccagggctgcctgcctccgttcccggcggacgtcttcatgattccccagtacggctaccttacactgaacaatggaagtcaagccgtaggccgttcctccttctactgcctggaatattttccatctcaaatgctgcgaactggaaacaattttgaattcagctacaccttcgaggacgtgcctttccacagcagctacgcacacagccagagcttggaccgactgatgaatcctctcatcgaccagtacctgtactacttatccagaactcagtccacaggaggaactcaaggtacccagcaattgttattttctcaagctgggcctgcaaacatgtcggctcaggctaagaactggctacctggaccttgctaccggcagcagcgagtctctacgacactgtcgcaaaacaacaacagcaactttgcttggactggtgccaccaaatatcacctgaacggaagagactctttggtaaatcccggtgtcgccatggcaacccacaaggacgacgaggaacgcttcttcccgtcgagtggagtcctgatgttcggaaaacagggtgctggaagagacaatgtggactacagcagcgttatgctaaccagcgaagaagaaattaaaaccactaaccccgtagccacagaacaatacggtgtggtggctgacaacttgcagcaaaccaatacagggcctattgtgggaaatgtcaacagccaaggagccttacctggcatggtctggcagaaccgagacgtgtacctgcagggtcccatctgggccaagattcctcacacggacggcaacttccacccttcaccgctaatgggaggatttggactgaagcacccacctcctcagatcctgatcaagaacacgccggtacctgcggatcctccaacaacgttcagccaggcgaaattggcttccttcattacgcagtacagcaccggacaggtcagcgtggaaatcgagtgggagctgcagaaggagaacagcaaacgctggaacccagagattcagtacacttcaaactactacaaatctacaaatgtggactttgctgtcaatacagagggaacttattctgagcctcgccccattggtactcgttacctcacccgtaatctgtaa

SEQ ID NO: 277 - protein, 738 aa, Adeno-associated virus
MAADGYLPDWLEDNLSEGIREWWDLKPGAPKPKANQQKQDDGRGLVLPGYKYLGPFNGLDKGEPVNAADAAALEHDKAYDQQLKAGDNPYLRYNHADAEFQERLQEDTSFGGNLGRAVFQAKKRVLEPLGLVEEAAKTAPGKKRPVEPSPQRSPDSSTGIGKKGQQPAKKRLNFGQTGDSESVPDPQPIGEPPAGPSGLGSGTMAAGGGAPMADNNEGADGVGSSSGNWHCDSTWLGDRVITTSTRTWALPTYNNHLYKQISNGTSGGSTNDNTYFGYSTPWGYFDFNRFHCHFSPRDWQRLINNNWGFRPKRLSFKLFNIQVKEVTQNEGTKTIANNLTSTIQVFTDSEYQLPYVLGSAHQGCLPPFPADVFMIPQYGYLTLNNGSQAVGRSSFYCLEYFPSQMLRTGNNFEFSYTFEDVPFHSSYAHSQSLDRLMNPLIDQYLYYLSRTQSTGGTQGTQQLLFSQAGPANMSAQAKNWLPGPCYRQQRVSTTLSQNNNSNFAWTGATKYHLNGRDSLVNPGVAMATHKDDEERFFPSSGVLMFGKQGAGRDNVDYSSVMLTSEEEIKTTNPVATEQYGVVADNLQQTNTGPIVGNVNSQGALPGMVWQNRDVYLQGPIWAKIPHTDGNCHPSPLMGGFGLKHPPPQILIKNTPVPADPPTTFSQAKLASFITQYSTGQVSVEIEWELQKENSKRWNPEIQYTSNYYKSTNVDFAVNTEGTYSEPRPIGTRYLTRNL

SEQ ID NO: 278 - protein, 738 aa, Adeno-associated virus
MAADGYLPDWLEDNLSEGIREWWDLKPGAPKPKANQQKQDDGRGLVLPGYKYLGPFNGLDKGEPVNAADAAALEHDKAYDQQLKAGDNPYLRYNHADAEFQERLQEDTSFGGNLGRAVFQAKKRVLEPLGLVEEGAKTAPGKKRPVEPSPQRSPDSSTGIGKKGQQPARKRLNFGRTGDSESVPDPQPIGEPPAAPSSVGSGTMAAGGGAPMADNNEGADGVGSSSGNWHCDSTWLGDRVITTSTRTWALPTYNNHLYKQISNGTSGGSTNDNTYFGYSTPWGYLDFNRFHCHFSPRDWQRLINNNWGFRPKRLSFKLFNIQVKEVTQNEGTKTIANNLASTIQVFTDSEYQPPYVLGSAHQGCLPPFPADVFMIPQYGYLTLNNGSQAVGRSSFYCLEYFPSQMLRTGNNFSFSYTFEDVPFHSSYAHSQSLDRLMNPLIDQYLYYLSRTQSTGGTAGTQQLLFSRAGPSNMSAQARNWLPGPCYRQQRVSTTLSQNNNSNFAWTGATKYHLNGRDSLVNPGVAMATNKDDEDRFFPSSGILMFGKQGAGKDNVDYSNVMLTSEEEIKTTNPVATEQYGVVADNLQQQNTAPTVGAVNSQGALPGMVWQNRDVYLQGPIWAKIPHTDGNFHPSPLMGGFGLKHPPPQILIKNTPVPADPPTAFNQAKLNSFIAQYSTGQVSVEIEWELQKENSKRWNPEIQYTSNYYKSTNADFAVNTEGVYSEPRPIGTRYLTRNL

SEQ ID NO: 279 - DNA, 2217 bp, Adeno-associated virus
  source 1..2217: mol_type = unassigned DNA
atggctgccgatggttatcttccagattggctcgaggacaacctctctgagggcattcgcgagtggtgggacctgaaacctggagccccgaaacccaaagccaaccagcaaaagcaggacgacggccggggtctggtgcttcctggctacaagtacctcggacccttcaacggactcgacaagggggagcccgtcaacgcggcggacgcagcggccctcgagcacgacaaggcctacgaccagcagctcaaagcgggtgacaatccgtacctgcggtataatcacgccgacgccgagtttcaggagcgtctgcaagaagatacgtcttttgggggcaacctcgggcgagcagtcttccaggccaagaagcgggttctcgaacctctcggtctggttgaggaaggcgctaagacggctcctggaaagaagagaccggtagagccgtcaccacagcgttcccccgactcctccacgggcatcggcaagaaaggccagcagcccgccagaaagagactcaatttcggtcggactggcgactcagagtcagtccccgaccctcaacctatcggagaacctccagcagcgccctctagtgtgggatctggtacaatggctgcaggcggtggcgcaccaatggcagacaataacgaaggtgccgacggagtgggtagttcctcgggaaattggcattgcgattccacatggctgggcgacagagttatcaccaccagcacccgaacctgggccctgcccacctacaacaaccacctctacaagcaaatctccaacgggacctcgggaggcagcaccaacgacaacacctactttggctacagcaccccctgggggtatcttgactttaacagattccactgccacttctcaccacgtgactggcagcgactcatcaacaacaactggggattccggcccaagagactcagcttcaagctcttcaacatccaggtcaaagaggtcacgcagaatgaaggcaccaagaccatcgccaataacctcgccagcaccatccaggtgtttacggactcggaataccagccgccgtacgtcctcggctctgcccaccagggctgcctgcctccgttcccggcggacgtcttcatgattcctcagtacggctacctgactctcaacaacggtagtcaggccgtgggacgttcctccttctactgcctggagtacttcccctctcagatgctgagaacgggcaacaacttttccttcagctacactttcgaggacgtgcctttccacagcagctacgcgcacagccagagtttggacaggctgatgaatcctctcatcgaccagtacctgtactacctgtcaagaacccagtctacgggaggcacagcgggaacccagcagttgctgttttctcgggccgggcctagcaacatgtcggctcaggccagaaactggctgcctggaccctgctacagacagcagcgcgtctccacgacactgtcgcaaaacaacaacagcaactttgcctggactggtgccaccaagtatcatctgaacggcagagactctctggtgaatccgggcgtcgccatggcaaccaacaaggacgacgaggaccgcttcttcccatccagcggcatcctcatgtttggcaagcagggagctggaaaagacaacgtggactatagcaacgtgatgctaaccagcgaggaagaaatcaagaccaccaaccccgtggccacagaacagtatggcgtggtggctgataacctacagcagcaaaacaccgctcctactgtgggggccgtcaacagccagggagccttacctggcatggtctggcagaaccgggacgtgtacctgcagggtcctatttgggccaagattcctcacacagatggcaactttcacccgtctcctttaatgggcggctttggacttaaacatccgcctcctcagatcctcatcaaaaacactcctgttcctgcggatcctccaacagcgttcaaccaggccaagctgaattctttcatcgcgcagtacagcaccggacaagtcagcgtggagatcgagtgggagctgcagaaggagaacagcaagcgctggaacccagagattcagtatacttccaactactacaaatctacaaatgcggactttgctgttaatactgagggtgtttactctgagcctcgccccattggcactcgttacctcacccgtaatctgtaa

SEQ ID NO: 280 - DNA, 2208 bp, Adeno-associated virus
  source 1..2208: mol_type = unassigned DNA
atggctgccgatggttatcttccagattggctcgaggacactctctctgaaggaataagacagtggtggaagctcaaacctggcccaccaccaccaaagcccgcagagcggcataaggacgacagcaggggtcttgtgcttcctgggtacaagtacctcggacccttcaacggactcgacaagggggagccggtcaacgaggcagacgccgcggccctcgagcacgacaaggcctacgaccggcagctcgacagcggagacaacccgtacctcaagtacaaccacgccgacgcagagtttcaggagcgccttaaagaagatacgtcttttgggggcaacctcggacgagcagtcttccaggcgaaaaagagggttcttgaacctctgggcctggttgaggagcctgttaagacggctccgggaaaaaagaggccggtagagcactctcctgtggagccagactcctcctcgggaaccggaaaagcgggccagcagcctgcaagaaaaagattaaattttggtcagactggagacgcagactccgtacctgacccccagcctctcggacagccaccagcagccccctctggtctgggatctactacaatggctacaggcagtggcgcaccaatggcagacaataacgagggtgccgatggagtgggtaattcctcaggaaattggcattgcgattcccaatggctgggcgacagagtcatcaccaccagcacccgaacctgggccctgcccacatacaacaaccacctctacaagcaaatctccagccaatcaggagccagcaacgacaaccactactttggctacagcaccccctgggggtattttgacttcaacagattccactgccacttttcaccacgtgactggcaaagactcgtcaacaacaaccggggattccggcccaaaagactcaacttcaagctctttaatattcaagtcaaagaggtcacgcagaatgacggtacgacgacgattgccaataaccttaccagcacggttcaggtgtttactgactcggagtaccagctcccgtacgtcctgggctcggcgcatcaaggatgcctcccgccgtttccagcggacgtcttcatggtcccacagtatggatacctcaccctgaacaacgggagtcaggcggtaggacgctcttccttttactgcctggagtactttccttctcagatgctgcgtactggaaacaactttcagttcagctacacttttgaagacgtgcctttccacagcagctacgctcacagccagagtctggatcggctgatgaatcctctgatcgaccagtacctgtattatctgaacaagacacaaacaaatagtggaactcttcagcagtctcggctactgtttagccaagctggaccaaccaacatgtctcttcaagctaaaaactggctgcctggaccttgctacagacagcagcgtctgtcaaaacaggcaaacgacaacaacaacagcaactttccctggactgcagctacaaagtatcatctaaatggccgggactcgttggttaatccaggaccagctatggccagtcacaaggatgacgaagaaaagtttttccccatgcatggaaccctgatatttggtaaacaaggaacaaatgccaacgacgcggatttggaaaatgtcatgattacagatgaagaagaaatcagggccaccaatcccgtggctacggagcagtacgggactgtgtcaaataatttgcaaaactcaaacactggtccaactactggaactgtcaatcaccaaggagcgttacctggtatggtgtggcaggatcgagacgtgtacctgcagggacccatttgggccaagattcctcacaccgatggacactttcatccttctccactgatgggaggttttggactcaaacacccgcctcctcagatcatgatcaaaaacactcccgttccagccaatcctcccacaaacttcagttctgccaagtttgcttctttcatcacacagtattccacgggacaggtcagcgtggagatcgagtgggagctgcagaaggagaacagcaaacgctggaatcccgaaattcagtacacttccaactacaacaagtctgttaatgtggactttactgtggacactaatggtgtgtattcagagcctcgccccattggcaccagatacctgactcgtaatctgtaa

SEQ ID NO: 281 - protein, 735 aa, Adeno-associated virus
MAADGYLPDWLEDTLSEGIRQWWKLKPGPPPPKPAERHKDDSRGLVLPGYKYLGPFNGLDKGEPVNEADAAALEHDKAYDRQLDSGDNPYLKYNHADAEFQERLKEDTSFGGNLGRAVFQAKKRVLEPLGLVEEPVKTAPGKKRPVEHSPVEPDSSSGTGKAGQQPARKRLNFGQTGDADSVPDPQPLGQPPAAPSGLGSTTMATGSGAPMADNNEGADGVGNSSGNWHCDSQWLGDRVITTSTRTWALPTYNNHLYKQISSQSGASNDNHYFGYSTPWGYFDFNRFHCHFSPRDWQRLVNNNRGFRPKRLNFKLFNIQVKEVTQNDGTTTIANNLTSTVQVFTDSEYQLPYVLGSAHQGCLPPFPADVFMVPQYGYLTLNNGSQAVGRSSFYCLEYFPSQMLRTGNNFQFSYTFEDVPFHSSYAHSQSLDRLMNPLIDQYLYYLNKTQTNSGTLQQSRLLFSQAGPTNMSLQAKNWLPGPCYRQQRLSKQANDNNNSNFPWTAATKYHLNGRDSLVNPGPAMASHKDDEEKFFPMHGTLIFGKQGTNANDADLENVMITDEEEIRATNPVATEQYGTVSNNLQNSNTGPTTGTVNHQGALPGMVWQDRDVYLQGPIWAKIPHTDGHFHPSPLMGGFGLKHPPPQIMIKNTPVPANPPTNFSSAKFASFITQYSTGQVSVEIEWELQKENSKRWNPEIQYTSNYNKSVNVDFTVDTNGVYSEPRPIGTRYLTRNL

SEQ ID NO: 282 - protein, 738 aa, Adeno-associated virus
MAADGYLPDWLEDNLSEGIREWWDLKPGAPKPKANQQKQDDGRGLVLPGYKYLGPFNGLDKGEPVNAADAAALEHDKAYDQQLKAGDNPYLRYNHADAEFQERLQEDTSFGGNLGRAVFQAKKRVLEPLGLVEEAAKTAPGKKRPVEPSPQRSPDSSTGIGKKGQQPAKKRLSFGQTGDSESVPDPQPIGEPPAGPSGLGSGTMAAGGGAPMADNNEGADGVGSSSGNWHCDSTWLGDRVITTSTRTWALPTYNNHLYKQISNGTSGGSTNDNTYFGYSTPWGYFDFNRFHCHFSPRDWQRLINNNWGFRPKRLSFKLFNIQVKEVTQNEGTKTIANNLTSTIQVFTDSEYQLPYVLGSAHQGCLPPFPADVFMIPQYGYLTLNNGSQAVGRSSFYCLEYFPSQMLRTGNNSEFSYTFEDVPFHSSYAHSQSLDRLMNPLIDQYLYYLSRTQSTGGTQGTQQLLFSQAGPANMSAQAKNWLPGPCYRQQRVSTTLSQNNNSNFAWTGATKYHLNGRDSLVNPGVAMATHKDDEERFFPSSGVLMFGKQGAGRDNVDYSSVMLTSEEEIKTTNPVATEQYGVVADNLQQTNTGPIVGNVNSQGALPGMVWQNRDVYLQGPIWAKIPHTDGNFHPSPLMGGFGLKHPPPQILIKNTPVPADPPTTFSQAKLASFITQYSTGQVSVEIEWELQKENSKRWNPEIQYTSNYYKSTNVDFAVNTEGTYSEPRPIGTRYLTRNL

SEQ ID NO: 283 - DNA, 2217 bp, Adeno-associated virus
  source 1..2217: mol_type = unassigned DNA
atggctgctgacggttatcttccagattggctcgaggacaacctctctgagggcattcgcgagtggtgggacctgaaacctggagcccccaagcccaaggccaaccagcagaagcaggacgacggccggggtctggtgcttcctggctacaagtacctcggacccttcaacggactcgacaagggggagcccgtcaacgcggcggacgcagcggccctcgagcacgacaaggcctacgaccagcagctcaaagcgggtgacaatccgtacctgcggtataaccacgccgacgccgagtttcaggagcgtctgcaagaagatacgtcttttgggggcaacctcgggcgagcagtcttccaggccaagaagcgggttctcgaacctctcggtctggttgaggaagctgctaagacggctcctggaaagaagagaccggtagaaccgtcacctcagcgttcccccgactcctccacgggcatcggcaagaaaggccagcagcccgctaaaaagagactgagctttggtcagactggcgactcagagtcagtccccgaccctcaaccaatcggagaaccaccagcaggcccctctggtctgggatctggtacaatggctgcaggcggtggcgctccaatggcagacaataacgaaggcgccgacggagtgggtagttcctcaggaaattggcattgcgattccacatggctgggcgacagagtcatcaccaccagcacccgaacctgggccctgcccacctacaacaaccacctctacaagcaaatatccaatgggacatcgggaggaagcaccaacgacaacacctacttcggctacagcaccccctgggggtattttgacttcaacagattccactgccacttctcaccacgtgactggcagcgactcatcaacaacaactggggattccggccaaaaagactcagcttcaagctcttcaacatccaggtcaaggaggtcacgcagaatgaaggcaccaagaccatcgccaataaccttaccagcacgattcaggtatttacggactcggaataccagctgccgtacgtcctcggctccgcgcaccagggctgcctgcctccgttcccggcggacgtcttcatgattccccagtacggctaccttacactgaacaatggaagtcaagccgtaggccgttcctccttctactgcctggaatattttccatctcaaatgctgcgaactggaaacaattctgaattcagctacaccttcgaggacgtgcctttccacagcagctacgcacacagccagagcttggaccgactgatgaatcctctcatcgaccagtacctgtactacttatccagaactcagtccacaggaggaactcaaggtacccagcaattgttattttctcaagctgggcctgcaaacatgtcggctcaggctaagaactggctacctggaccttgctaccggcagcagcgagtctctacgacactgtcgcaaaacaacaacagcaactttgcttggactggtgccaccaaatatcacctgaacggaagagactctttggtaaatcccggtgtcgccatggcaacccacaaggacgacgaggaacgcttcttcccgtcgagtggagtcctgatgtttggaaaacagggtgctggaagagacaatgtggactacagcagcgttatgctaaccagcgaagaagaaattaaaaccactaaccctgtagccacagaacaatacggtgtggtggctgacaacttgcagcaaaccaatacagggcctattgtgggaaatgtcaacagccaaggagccttacctggcatggtctggcagaaccgagacgtgtacctgcagggtcccatctgggccaagattcctcacacggacggcaacttccacccttcaccgctaatgggaggatttggactgaagcacccacctcctcagatcctgatcaagaacacgccggtacctgcggatcctccaacaacgttcagccaggcgaaattggcttccttcattacgcagtacagcaccggacaggtcagcgtggaaatcgagtgggagctgcagaaggagaacagcaaacgctggaacccagagattcagtacacttcaaactactacaaatctacaaatgtggactttgctgtcaatacagagggaacttattctgagcctcgccccattggtactcgttacctcacccgtaatctgtaa

SEQ ID NO: 284 - protein, 738 aa, Adeno-associated virus
MAADGYLPDWLEDNLSEGIREWWDLKPGAPKPKANQQKQDDGRGLVLPGYKYLGPFNGLDKGEPVNAADAAALEHDKAYDQQLKAGDNPYLRYNHADAEFQERLQEDTSFGGNLGRAVFQAKKRVLEPLGPVEEAAKTAPGKKRPVEPPPQRSPDSSTGIGKKGQQPAKKRLNFGQTGDSESVPDPQPIGEPPAGPSGLGSGTMAAGGGAPMADNNEGADGVGSSSGNWHCDSTWLGDRVITTSTRTWALPTYNNHLYKQISNGTSGGSTNDNTYFGYSTPWGYFDFNRFHCHFSPRDWQRLINNNWGFRPKRLSFKLFNIQVKEVTQNEGTKTVANNLTSTIQVFTDSEYQLPYVLGSAHQGCLPPFPADVFMIPQYGYLTLNNGSQAVGRSSFYCLEYFPSQMLRTGNNFEFSYTFEDVPFHSSYAHSQSLDRLMNPLIDQYLYYLSRTQSTGGTQGTQQLLFSQAGPANMSAQAKNWLPGPCYRQQRVSTTLSQNNNSNFAWTGATKYHLNGRDSLVNPGVAMATHKDDEERFFPSSGVLMFGKQGAGRDNVDYSSVMLTSEEEIKTTNPVATEQYGVVADNLQQTNTGPIVGNVNSQGALPGMVWQNRDVYLQGPIWAKIPHTDGNFHPSPLMGGFGLKHPPPQILIKNTPVPADPPTTFSQAKLASFITQYSTGQVSVEIEWELQKENSKRWNPEIQYTSNYYKSTNVDFAVNTEGTYSEPRPIGTRYLTRNL

SEQ ID NO: 285 - DNA, 2217 bp, Adeno-associated virus
  source 1..2217: mol_type = unassigned DNA
atggctgctgacggttatcttccagattggctcgaggacaacctctctgagggcattcgcgagtggtgggacctgaaacctggagcccccaagcccaaggccaaccagcagaagcaggacgacggccggggtctggtgcttcctggctacaagtacctcggacccttcaacggactcgacaagggggagcccgtcaacgcggcggacgcagcggccctcgagcacgacaaggcctacgaccagcagctcaaagcgggtgacaatccgtacctgcggtataaccacgccgacgccgagtttcaggagcgtctacaagaagatacgtcttttgggggcaacctcgggcgagcagtcttccaggccaagaagcgggttctcgaacctctcggtccggttgaggaagctgctaagacggctcctggaaagaagagaccggtagaaccgccacctcagcgttcccccgactcctccacgggcatcggcaagaaaggccagcagcccgctaaaaagagactgaactttggtcagactggcgactcagagtcagtccccgaccctcaaccaatcggagaaccaccagcaggcccctctggtctgggatctggtacaatggctgcaggcggtggcgctccaatggcagacaataacgaaggcgccgacggagtgggtagttcctcaggaaattggcattgcgattccacatggctgggcgacagagtcatcaccaccagcacccgaacctgggccctgcccacctacaacaaccacctctacaagcaaatatccaatgggacatcgggaggaagcaccaacgacaacacctacttcggctacagcaccccctgggggtattttgacttcaacagattccactgccacttctcaccacgtgactggcagcgactcatcaacaacaactggggattccggccaaaaagactcagcttcaagctcttcaacatccaggtcaaggaggtcacgcagaatgaaggcaccaagaccgtcgccaataaccttaccagcacgattcaggtatttacggactcggaataccagctgccgtacgtcctcggctccgcgcaccagggctgcctgcctccgttcccggcggacgtcttcatgattccccagtacggctaccttacactgaacaatggaagtcaagccgtaggccgttcctccttctactgcctggaatattttccatctcaaatgctgcgaactggaaacaattttgaattcagctacaccttcgaggacgtgcctttccacagcagctacgcacacagccagagcttggaccgactgatgaatcctctcatcgaccagtacctgtactacttatccagaactcagtccacaggaggaactcaaggtacccagcaattgttattttctcaagctgggcctgcaaacatgtcggctcaggctaagaactggctacctggaccttgctaccggcagcagcgagtctctacgacactgtcgcaaaacaacaacagcaactttgcttggactggtgccaccaaatatcacctgaacggaagagactctttggtaaatcccggtgtcgccatggcaacccacaaggacgacgaggaacgcttcttcccgtcgagtggagtcctgatgtttggaaaacagggtgctggaagagacaatgtggactacagcagcgttatgctaaccagcgaagaagaaattaaaaccactaaccctgtagccacagaacaatacggtgtggtggctgacaacttgcagcaaaccaatacagggcctattgtgggaaatgtcaacagccaaggagccttacctggcatggtctggcagaaccgagacgtgtacctgcagggtcccatctgggccaagattcctcacacggacggcaacttccacccttcaccgctaatgggaggatttggactgaagcacccacctcctcagatcctgatcaagaacacgccggtacctgcggatcctccaacaacgttcagccaggcgaaattggcttccttcattacgcagtacagcaccggacaggtcagcgtggaaatcgagtgggagctgcagaaggagaacagcaaacgttggaacccagagattcagtacacttcaaactactacaaatctacaaatgtggactttgctgtcaatacagagggaacttattctgagcctcgccccattggtactcgttacctcacccgtaatctgtaa

SEQ ID NO: 286 - protein, 738 aa, Adeno-associated virus
MAADGYLPDWLEDNLSEGIREWWDLKPGAPKPKANQQKQDDGRGLVLPGYKYLGPFNGLDKGEPVNAADAAALEHDKAYDQQLKAGDNPYLRYNHADAEFQERLQEDTSFGGNLGRAVFQAKKRVLEPLGLVEEAAKTAPGKKRPVEPSPQRSPDSSTGIGKKGQQPAKKRLNFGQTGDSESVPDPQPIGEPPAGPSGLGSGTMAAGGGAPMADNNEGADGVGSSSGNWHCDSTWLGDRVITTSTRTWALPTYNNHLYKQISNGTSGGSTNDNTYFGYSTPWGYFDFNRFHCHFSPRDWQRLINNNWGFRPKRLSFKLFNIQVKEVTQNEGTKTIANNLTSTIQVFTDSEYQLPYVLGSAHQGCLPPFPADVFMIPQYGYLTLNNGSQAVGRSSFYCLEYFPSQMLRTGNNFEFSYTFEDVPFHSSYAHSQSLDRLMNPLIDQYLYYLSRTQSTGGTQGTQQLLFSQAGPANMSAQAKNWLPGPCYRQQRVSTTLSQSNNSNFAWTGATKYHLNGRDSLVNPGVAMATHKDDEERFFPSSGVLMFGKQGAGRDNVDYSSVMLTSEEEIKTTNPVATEQYGVVADNLQQTNTGPIVGNVNSQGALPGMVWQNRDVYLQGPIWAKIPHTDGNFHPSPLMGGLGLKHPPPQILIKNTPVPADPPTTFSQAKLASFITQYSTGQVSVEIEWELQKENSKRWNPEIQYTSNYYKSTNVDFAVNTEGTYSEPRPIGTRYLTRNL

SEQ ID NO: 287 - DNA, 2217 bp, Adeno-associated virus
  source 1..2217: mol_type = unassigned DNA
atggctgctgacggttatcttccagattggctcgaggacaacctctctgagggcattcgcgagtggtgggacctgaaacctggagcccccaagcccaaggccaaccagcagaagcaggacgacggccggggtctggtgcttcctggctacaagtacctcggacccttcaacggactcgacaagggggagcccgtcaacgcggcggacgcagcggccctcgagcacgacaaggcctacgaccagcagctcaaagcgggtgacaatccgtacctgcggtataaccacgccgacgccgagtttcaggagcgtctgcaagaagatacgtcttttgggggcaacctcgggcgagcagtcttccaggccaagaagcgggttctcgaacctctcggtctggttgaggaagcggctaagacggctcctggaaagaagagaccggtagaaccgtcacctcagcgttcccccgactcctccacgggcatcggcaagaaaggccagcagcccgctaaaaagagactgaactttggtcagactggcgactcagagtcagtccccgaccctcaaccaatcggagaaccaccagcaggcccctctggtctgggatctggtacaatggctgcaggcggtggcgctccaatggcagacaataacgaaggcgccgacggagtgggtagttcctcaggaaattggcattgcgattccacatggctgggcgacagagtcatcaccaccagcacccgaacctgggccctgcccacctacaacaaccacctctacaagcaaatatccaatgggacatcgggaggaagcaccaacgacaacacctacttcggctacagcaccccctgggggtattttgacttcaacagattccactgccacttctcaccacgtgactggcagcgactcatcaacaacaactggggattccggccaaaaagactcagcttcaagctcttcaacatccaggtcaaggaggtcacgcagaatgaaggcaccaagaccatcgccaataaccttaccagcacgattcaggtatttacggactcggaataccagctgccgtacgtcctcggctccgcgcaccagggctgcctgcctccgttcccggcggacgtcttcatgattccccagtacggctaccttacactgaacaatggaagtcaagccgtaggccgttcctccttctactgcctggaatattttccatctcaaatgctgcgaactggaaacaattttgaattcagctacaccttcgaggacgtgcctttccacagcagctacgcacacagccagagcttggaccgactgatgaatcctctcatcgaccagtacctgtactacttatccagaactcagtccacaggaggaactcaaggtacccagcaattgttattttctcaagctgggcctgcaaacatgtcggctcaggctaagaactggctacctggaccttgctaccggcagcagcgagtctctacgacactgtcgcaaagcaacaacagcaactttgcttggactggtgccaccaaatatcacctgaacggaagagactctttggtaaatcccggtgtcgccatggcaacccacaaggacgacgaggaacgcttcttcccgtcgagtggagtcctgatgtttggaaaacagggtgctggaagagacaatgtggactacagcagcgttatgctaaccagcgaagaagaaattaaaaccactaaccctgtagccacagaacaatacggtgtggtggctgacaacttgcagcaaaccaatacagggcctattgtgggaaatgtcaacagccaaggagccttacctggcatggtctggcagaaccgagacgtgtacctgcagggtcccatctgggccaagattcctcacacggacggcaacttccacccttcaccgctaatgggaggacttggactgaagcacccacctcctcagatcctgatcaagaacacgccggtacctgcggatcctccaacaacgttcagccaggcgaaattggcttccttcattacgcagtacagcaccggacaggtcagcgtggaaatcgagtgggagctgcagaaggagaacagcaaacgctggaacccagagattcagtacacttcaaactactacaaatctacaaatgtggactttgctgtcaatacagagggaacttattctgagcctcgccccattggtactcgttacctcacccgtaatctgtaa

SEQ ID NO: 288 - protein, 737 aa, Adeno-associated virus
MAADGYLPDWLEDNLSEGIREWWDLKPGAPKPKANQQKQDDGRGLVLPGYKYLGPFNGLDKGEPVNAADAAALEHDKAYDQQLKAGDNPYPRYNHADAEFQERLQEDTPFGGNLGRAVFQAKKRVLEPLGLVEEAAKTAPGKKRPVEPSPQRSPDSSTGIGKKGQQPAKKRLNFGQTGDSESVPDPQPIGEPPAGPSGLGSGTMAAGGGAPMADNNEGADGVGNASGNWHCDSTWLGDRVITTSTRTWALPTYNNHLYKQISSASTGASNDNHYFGYSTPWGYFDFNRFHCHFSPRDWQRLINNNWGFRPKRLNFKLFNIQVKEVTTNDGVTTIANNLTSTVQVFSDSEYQLPYVLGSAHQGCLPPFPADVFMIPQYGYLTLNNGSQAVGRSSFYCLEYFPSQMLRTGNNFTFSYTFEEVPLHSSYAHSQSLDRLMNPLIVQYLYYLNRTQNQSGSAQNKDLLFSRGSPAGMSVQPKNWLPGPCYRQQRVSKTKTDNNNSNFTWTGASKYNLNGRESIINPGTAMASHKDDEDKFFPMSGVMIFGKESAGASNTALDNVMITDEEEIKATNPVATERFGTVAVNFQSSSTDPATGDVHAMGALPGMVWQDRDVYLQGPIWAKIPHTDGHFHPSPLMGGFGLKNPPPQILIKNTPVPANPPAEFSATKFASFITQYSTGQVSVEIEWELQKENSKRWNPEVQYTSNYAKSASVDFTVDNNGLYTEPRPIGTRYLTRPL

SEQ ID NO: 289 - protein, 737 aa, Adeno-associated virus
MAADGYLPDWLEDNLSEGIREWWDLKPGAPKPKANQQKQDDGRGLVLPGYKYLGPFNGLDKGEPVNAADAAALEHDKAYDQQLKAGDNPYPRYNHADAEFQERLQEDTSFGGNLGRAVFQAKKRVLEPLGLVEEAAKTAPGKKRPVEPSPQRSPDSSTGIGKKGQQPAKKRLNFGQTGDSESVPDPQPIGEPPAGPSGLGSGTMAAGGGAPMADNNEGADGVGNASGNWHCDSTWLGDRVITTSTRTWALPTYNNHLYKQISSASTGASNDNHYFGYSTPWGYFDFNRFHCHFSPRDWQRLINNNWGFRPKRLNFKLFNIQVKEVTTNDGVTTIANNLTSTVQVFSDSEYQLPYVLGSAHQGCLPPFPADVFMIPQYGYLTLNNGSQAVGRSSFYCLEYFPSQMLRTGNNFTFSYTFEEVPLHSSYAHSQSLDRLMNPLIDQYLYYLNRTQNQSGSAQNKDLLFSRGSPAGMSVQPKNWLPGPCYRQQRVSKTKTDNNNSNFTWTGASKYNLNGRESIINPGTAMASHKDDEDKFFPMSGVMIFGKESAGASNTALDNVMITDEEEIKATNPVATERFGTVAVNFQSSSTDPATGDVHAMGALPGMVWQDRDVYLQGPIWAKIPHTDGHFHPSPLMGGFGLKNPPPQILIKNTPVPANPPAEFSATKFASFITQYSTGQVSVEIEWELQKENSKRWNPEVQYTSNYAKSASVDFTVDNNGLYTEPRPIGTRYLTRPL

SEQ ID NO: 290 - DNA, 2214 bp, Adeno-associated virus
  source 1..2214: mol_type = unassigned DNA
atggctgctgacggttatcttccagattggctcgaggacaacctctctgagggcattcgcgagtggtgggacctgaaacctggagcccccaagcccaaggccaaccagcagaagcaggacgacggccggggtctggtgcttcctggctacaagtacctcggacccttcaacggactcgacaagggggagcccgtcaacgcggcggacgcagcggccctcgagcacgacaaggcctacgaccagcagctcaaagcgggtgacaatccgtacccgcggtataaccacgccgacgccgagtttcaggagcgtctgcaagaagatacgccttttgggggcaacctcgggcgagcagtcttccaggccaagaagcgggttctcgaacctctcggtctggttgaggaagctgctaagacggctcctggaaagaagagaccggtagaaccgtcacctcagcgttcccccgactcctccacgggcatcggcaagaaaggccagcagcccgctaaaaagagactgaactttggtcagactggcgactcagagtcagtccccgaccctcaaccaatcggagaaccaccagcaggcccctctggtctgggatctggtacaatggctgcaggcggtggcgctccaatggcagacaataacgaaggcgccgacggagtgggtaatgcctcaggaaattggcattgcgattccacatggctgggcgacagagtcatcaccaccagcacccgcacctgggccttgcccacctacaataaccacctctacaagcaaatctccagtgcttcaacgggggccagcaacgacaaccactacttcggctacagcaccccctgggggtattttgatttcaacagattccactgccacttttcaccacgtgactggcagcgactcatcaacaacaattggggattccggcccaagagactcaacttcaaactcttcaacatccaagtcaaggaggtcacgacgaatgatggcgtcacaaccatcgctaataaccttaccagcacggttcaagtcttctcggactcggagtaccagcttccgtacgtcctcggctctgcgcaccagggctgcctccctccgttcccggcggacgtgttcatgattccgcaatacggctacctgacgctcaacaatggcagccaagccgtgggacgttcatccttttactgcctggaatatttcccttctcagatgctgagaacgggcaacaactttaccttcagctacacctttgaggaagtgcctctccacagcagctacgcgcacagccagagcctggaccggctgatgaatcctctcatcgtccaatacctgtattacctgaacagaactcaaaatcagtccggaagtgcccaaaacaaggacttgctgttcagccgtgggtctccagctggcatgtctgttcagcccaaaaactggctacctggaccctgttatcggcagcagcgcgtttctaaaacaaaaacagacaacaacaacagcaattttacctggactggtgcttcaaaatataacctcaatgggcgtgaatccatcatcaaccctggcactgctatggcctcacacaaagacgacgaagacaagttctttcccatgagcggtgtcatgatttttggaaaagagagcgccggagcttcaaacactgcattggacaatgtcatgattacagacgaagaggaaattaaagccactaaccctgtggccaccgaaagatttgggaccgtggcagtcaatttccagagcagcagcacagaccctgcgaccggagatgtgcatgctatgggagcattacctggcatggtgtggcaagatagagacgtgtacctgcagggtcccatttgggccaaaattcctcacacagatggacactttcacccgtctcctcttatgggcggctttggactcaagaacccgcctcctcagatcctcatcaaaaacacgcctgttcctgcgaatcctccggcggagttttcagctacaaagtttgcttcattcatcacccaatactccacaggacaagtgagtgtggaaattgaatgggagctgcagaaagaaaacagcaagcgctggaatcccgaagtgcagtacacatccaattatgcaaaatctgccagcgttgattttactgtggacaacaatggactttatactgagcctcgccccattggcacccgttaccttacccgtcccctgtaa

SEQ ID NO: 291 - protein, 736 aa, Adeno-associated virus
MAADGYLPDWLEDTLSEGIRQWWKLRPGPPPPKPAERHKDDSRGLVLPGYKYLGPFNGLDKGEPVNEADAAALEHDKAYDRQLDSGDNPYLKYNHADAEFQERLKEDTSFGGNLGRAVFQAKKRVLEPLGLVEEGAETAPGKKRPVEQSPQGPDSSSGIGKTGQQPAKKRLNFGQTGDSESVPDPQPLGEPPATPAAVGPTTMASGGGAPMADNNEGADGVGNASGNWHCDSTWLGDRVITTSTRTWALPTYNNHLYKQISSASTGASNDNHYFGYSTPWGYFDFNRFHCHFSPRDWQRLINNNWGFRPKRLNFKLFNIQVKEVTTNDGVTTIANNLTSTVQVFSDSEYQLPYVLGSAHQGCLPPFPADVFMIPQYGYLTLNNGSQAVGRSSFYCLEYFPSQMLRTGNNFTFSYTFEEVPFHSSYAHSQSLDRLMNPLIDQYLYYPNRTQNQSGSAQNKDLLFSRGSPAGMSVQPKNWLPGPCYRQQRVSKTKTDNNNSNFTWTGASKYNLNGRESIINPGTAMASHKDDEDKFFPMSGVMIFGKESAGASNTALDNVMITDEEEIKATNPVATERFGTVAVNFQSSSTDPATGDVHAMGALPGMVWQGRDVYLQGPIWAKIPHTDGHFHPSPLMGGFGLKNPPPQILIKNTPVPANPPAEFSATKFASFITQYSTGQVSVEIEWELQKENSKRWNPEVQYTSNYAKSANVDFTVDNNGLYTEPRPIGTRYLTRPL

SEQ ID NO: 292 - DNA, 2211 bp, Adeno-associated virus
  source 1..2211: mol_type = unassigned DNA
atggctgccgatggttatcttccagattggctcgaggacactctctctgaaggaataagacagtggtggaagctcagacctggcccaccaccaccaaagcccgcagagcggcataaggacgacagcaggggtcttgtgcttcctgggtacaagtacctcggacccttcaacggactcgacaagggagagccggtcaacgaggcagacgccgcggccctcgagcacgacaaagcctacgaccggcagctcgacagcggagacaacccgtacctcaagtacaaccacgccgacgcggagtttcaggagcgccttaaagaagatacgtcttttgggggcaacctcgggcgagcagtcttccaggccaagaagcgggttctcgaacctctcggtctggttgaggaaggcgctgagacggctcctggaaagaaacgtccggtagagcagtcgccacaagggccagactcctcctcgggcatcggcaagacaggccagcagcccgctaaaaagagactcaattttggtcagactggcgactcagagtcagtccccgatccacaacctctcggagaacctccagcaacccccgctgctgtgggacctactacaatggcttcaggcggtggcgcaccaatggcagacaataacgaaggcgccgacggagtgggtaatgcctcaggaaattggcattgcgattccacatggctgggcgacagagtcatcaccaccagcacccgcacctgggccttgcccacctacaataaccacctctacaagcaaatctccagtgcttcaacgggggccagcaacgacaaccactacttcggctacagcaccccctgggggtattttgatttcaacagattccactgccacttttcaccacgtgactggcagcgactcatcaacaacaattggggattccggcccaagagactcaacttcaaactcttcaacatccaagtcaaggaggtcacgacgaatgatggcgtcacaaccatcgctaataaccttaccagcacggttcaagtcttctcggactcggagtaccagcttccgtacgtcctcggctctgcgcaccagggctgcctccctccgttcccggcggacgtgttcatgattccgcaatacggctacctgacgctcaacaatggcagccaagccgtgggacgttcatccttttactgcctggaatatttcccttctcagatgctgagaacgggcaacaactttaccttcagctacacctttgaggaagtgcctttccacagcagctacgcgcacagccagagcctggaccggctgatgaatcctctcatcgaccaatacctgtattacccgaacagaactcaaaatcagtccggaagtgcccaaaacaaggacttgctgtttagccgtgggtctccagctggcatgtctgttcagcccaaaaactggctacctggaccctgttatcggcagcagcgcgtttctaaaacaaaaacagacaacaacaacagcaattttacctggactggtgcttcaaaatataacctcaatgggcgtgaatccatcatcaaccctggcactgctatggcctcacacaaagacgacgaagacaagttctttcccatgagcggtgtcatgatttttggaaaagagagcgccggagcttcaaacactgcattggacaatgtcatgattacagacgaagaggaaattaaagccactaaccctgtggccaccgaaagatttgggaccgtggcagtcaatttccagagcagcagcacagaccctgcgaccggagatgtgcatgctatgggagcattacctggcatggtgtggcaaggtagagacgtgtacctgcagggtcccatttgggccaaaattcctcacacagatggacactttcacccgtctcctcttatgggcggctttggactcaagaacccgcctcctcagatcctcatcaaaaacacgcctgttcctgcgaatcctccggcggagttttcagctacaaagtttgcttcattcatcacccaatactccacaggacaagtgagtgtggaaattgaatgggagctgcagaaagaaaacagcaagcgctggaatcccgaagtgcagtacacatccaattatgcaaaatctgccaacgttgattttactgtggacaacaatggactttatactgagcctcgccccattggcacccgttaccttacccgtcccctgtaa

SEQ ID NO: 293 - protein, 736 aa, Adeno-associated virus
MAADGYLPDWLEDTLSEGIRQWWKLRPGPPPPKPAERHKDDSRGLVLPGYKYLGPFNGLDKGEPVNEADAAALEHDKAYDRQLDSGDNPYLKYNHADAEFQERLKEDTSFGGNLGRAVFQAKKRVLEPLGLVEEGAKTAPGKKRPVEQSPQGPDSSSGIGKTGQQPAKKRLNFGQTGDSESVPDPQPLGEPPATPAAVGPTTMASGGGAPMADNNEGADGVGNASGNWHCDSTWLGDRVITTSTRTWALPTYNNHLYKQISSASTGASNDNHYFGYSTPWGYFDFNRFHCHFSPRDWQRLINNNWGFRPKRLNFKLFNIQVKEVTTNDGVTTIANNLTSTVQVFSDSEYQLPYVLGSAHQGCLPPFPADVFMIPQYGYLTLNNGSQAVGRSSFYCLEYFPSQMLRTGNNFTFSYTFEEVPFHSSYAHSQSLDRLMNPLIDQYLYYPNRTQNQSGSAQNKDLLFSRGSPAGMSVQPKNWLPGPCYRQQRVSKTKTDNNNSNFTWTGASKYNLNGRESIINPGTAMASHKDDEDKFFPMSGVMIFGKESAGASNTALDNVMITDEEEIKATNPVATERFGTVAVNFQSSSTDPATGDVHAMGALPGMVWQGRDVYLQGPIWAKIPHTDGHFHPSPLMGGFGLKNPPPQILIKNTPVPANPPAEFSATKFASFITQYSTGQVSVEIEWELQKENSKRWNPEVQYTSNYAKSANVDFTVDNNGLYTEPRPIGTRYLTRPL

SEQ ID NO: 294 - protein, 736 aa, Adeno-associated virus
MAADGYLPDWLEDTLSEGIRQWWKLRPGPPPPKPAERHKDDSRGLVLPGYKYLGPFNGLDKGEPVNEADAAALEHDKAYDRQLDSGDNPYLKYNHADAEFQERLKEDTSFGGNLGRAVFQAKKRVLEPLGLVEEGAKTAPGKKRPVEQSPQGPDSSSGIGKTGQQPAKKRLNFGQTGDSESVPDPQPLGEPPATPAAVGPTTMASGGGAPMADNNEGADGVGNASGNWHCDSTWLGDRVITTSTRTWALPTYNNHLYKQISSASTGASNDNHYFGYSTPWGYFDFNRFHCHFSPRDWQRLINNNWGFRPKRLNFKLFNIQVKEVTTNDGVTTIANNLTSTVQVFSDSEYQLPYVLGSAHQGCLPPFPADVFMIPQYGYLTLNNGSQAVGRSSFYCLEYFPSQMLRTGNNFTFSYTFEEVPFHSSYAHSQSLDRLMNPLIDQYLYYLNRTQNQSGSAQNKDLLFSRGSPAGMSVQPKNWLPGPCYRQQRVSKTKTDNNNSNFTWTGASKYNLNGRESIINPGTAMASHKDDEDKFFPMSGVMIFGKESAGASNTALDNVMITDEEEIKATNPVATERFGTVAVNFQSSSTDPATGDVHAMGALPGMVWQGRDVYLQGPIWAKIPHTDGHFHPSPLMGGFGLKNPPPQILIKNTPVPANPPAEFSATKFASFITQYSTGQVSVEIEWELQKENSKRWNPEVQYTSNYAKSANVDFTVDNNGLYTEPRPIGTRYLTRPL

SEQ ID NO: 295 - protein, 736 aa, Adeno-associated virus
MAADGYLPDWLEDTLSEGIRQWWKLRPGPPPPKPAERHKDDSRGLVLPGYKYLGPFNGLDKGEPVNEADAAALEHDKAYDRQLDSGDNPYLKYNHADAEFQERLKEDTSFGGNLGRAVFQAKKRVLEPLGLVEEGAKTAPGKKRPVEQSPQGPDSSSGIGKTGQQPAKKRLNFGQTGDSESVPDPQPLGEPPATPAAVGPTTMASGGGAPMADNNEGADGVGNASGNWHCDSTWLGDRVITTSTRTWALPTYNNHLYKQISSASTGASNDNHYFGYSTPWGYFDFNRFHCHFSPRDWQRLINNNWGFRPKRLNFKLFNIQVKEVTTNDGVTTIANNLTSTVQVFSDSEYQLPYVLGSAHQGCLPPFPADVFMIPQYGYLTLNNGSQAVGRSSFYCLEYFPSQMLRTGNNFTFSYTFEEVPFHSSYAHSQSLDRLMNPLIDQYLYYLNRTQNQSGSAQNKDLLFSRGSPAGMSVQPKNWLPGPCYRQQRVSKTKTDNNNSNFTWTGASKYNLNGRESIINPGTAMASHKDDEDKFFPMSGVMIFGKESAGASNTALDNVMITDEEEIKATNPVATERFGTVAVNFQSSSTDPATGDVHAMGALPGMVWQDRDVYLQGPIWAKIPHTDGHFHPSPLMGGFGLKNPPPQILIKNTPVPANPPAEFSATKFASFITQYSTGQVSVEIEWELQKENSKRWNPEVQYTSNYAKSANVDFTVDNNGLYTEPRPIGTRYLTRPL

SEQ ID NO: 296 - DNA, 2208 bp, Adeno-associated virus
  source 1..2208: mol_type = unassigned DNA
atggctgccgatggctatcttccagattggctcgaggacactctctctgaaggaataagacagtggtggaagctcaaacctggcccaccaccaccaaagcccgcagagcggcatagggacgacagcaggggtcttgtgcttcctgggtacaagtacctcggacccttcaacggactcgacaagggagagccggtcaacgaggcagacgccgcggccctcgagcacgacaaagcctacgaccggcagctcgacagcggagacaacccgtacctcaagtacaaccacgccgacgcggagtttcaggagcgccttaaagaagatacgtcttttgggggcaacctcggacgagcagtcttccaggcgaaaaagagggttcttgaacctctgggcctggttgaggaacctgttaagacggctccgggaaaaaagaggccggtagagcactctcctgtggagccagactcctcctcgggaaccggaaaggcgggccagcagcctgcaagaaaaagattgaattttggtcagactggagacgcagactcagtacctgacccccagcctctcggacagccaccagcagccccctctggtctgggaactaatacgatggctacaggcagtggcgcaccaatggcagacaataacgagggcgccgacggagtgggtaattcctcgggaaattggcattgcgattccacatggatgggcgacagagtcatcaccaccagcacccgaacctgggccctgcccacctacaacaaccacctctacaaacaaatttccagccaatcaggagcctcgaacgacaatcactactttggctacagcaccccttgggggtattttgacttcaacagattccactgccacttttcaccacgtgactggcaaagactcatcaacaacaactggggattccgacccaagagactcaacttcaagctctttaacattcaagtcaaagaggtcacgcagaatgacggtacgacgacgattgccaataaccttaccagcacggttcaggtgtttactgactcggggtaccagctcccgtacgtcctcggctcggcgcatcaaggatgcctcccgccgttcccagcagacgtcttcatggtgccacagtatggataccccaccctgaacaacgggagtcaggcagtaggacgctcttcattttactgcctggagtactttccttctcagatgctgcgtaccggaaacaactttaccttcagctacacttttgaggacgttcctttccacagcagctacgctcacagccagagtctggaccgtctcatgaatcctctcatcgaccagtacctgtattacttgagcacaacaaacactccaagtggaaccaccacgcagtcaaggcttcagttttctcaggccggagcgagtgacattcgggaccagtctaggaactggcttcctggaccctgttaccgccagcagcgagtatcaaagacatctgcggataacaacaacagtgaatactcgtggactggagctaccaagtaccacctcaatggcagagactctctggtgaatccgggcccggccgtggcaagccacaaggacgatgaagaaaagttttttcctcagagcggggttctcatctttgggaagcaaggctcagagaaaacaaatgtggacattgaaaaggtcatgattacagacgaagaggaaatcaggacaaccaatcccgtggctacggagcagtatggttctgtatctaccaacctccagagaggcaacagacaagcagctaccgcagatgtcaacacacaaggcgttcttccaggcatggtctggcaggacagagatgtgtaccttcaggggcccatctgggcaaagattccacacacggacggacattttcacccctctcccctcatgggtggattcggacttaaacaccctcctccacagattctcatcaagaacaccccggtacctgcgaatccttcgaccaccttcagtgcggcaaagtttgcttccttcatcacacagtactccacgggacaggtcagcgtggagatcgagtgggagctgcagaaggaaaacagcaaacgctggaatcccgaaattcagtacacttccaactacaacaagtctgttaatgtggactttactgtggacactaatggcgtgtattcagagcctcgccccattggcaccagatacctgactcgtaatctgtaa

SEQ ID NO: 297 - protein, 735 aa, Adeno-associated virus
MAADGYLPDWLEDTLSEGIRQWWKLKPGPPPPKPAERHRDDSRGLVLPGYKYLGPFNGLDKGEPVNEADAAALEHDKAYDRQLDSGDNPYLKYNHADAEFQERLKEDTSFGGNLGRAVFQAKKRVLEPLGLVEEPVKTAPGKKRPVEHSPVEPDSSSGTGKAGQQPARKRLNFGQTGDADSVPDPQPLGQPPAAPSGLGTNTMATGSGAPMADNNEGADGVGNSSGNWHCDSTWMGDRVITTSTRTWALPTYNNHLYKQISSQSGASNDNHYFGYSTPWGYFDFNRFHCHFSPRDWQRLINNNWGFRPKRLNFKLFNIQVKEVTQNDGTTTIANNLTSTVQVFTDSGYQLPYVLGSAHQGCLPPFPADVFMVPQYGYPTLNNGSQAVGRSSFYCLEYFPSQMLRTGNNFTFSYTFEDVPFHSSYAHSQSLDRLMNPLIDQYLYYLSTTNTPSGTTTQSRLQFSQAGASDIRDQSRNWLPGPCYRQQRVSKTSADNNNSEYSWTGATKYHLNGRDSLVNPGPAVASHKDDEEKFFPQSGVLIFGKQGSEKTNVDIEKVMITDEEEIRTTNPVATEQYGSVSTNLQRGNRQAATADVNTQGVLPGMVWQDRDVYLQGPIWAKIPHTDGHFHPSPLMGGFGLKHPPPQILIKNTPVPANPSTTFSAAKFASFITQYSTGQVSVEIEWELQKENSKRWNPEIQYTSNYNKSVNVDFTVDTNGVYSEPRPIGTRYLTRNL

SEQ ID NO: 298 - DNA, 2211 bp, Adeno-associated virus
  source 1..2211: mol_type = unassigned DNA
atggctgccgacggttatcttccagattggctcgaggacactctctctgaaggaataagacagtggtggaagctcaaacctggcccaccaccaccaaagcccgcagagcggcataaggacgacagcaggggtcttgtgcttcctgggtacaagtacctcggacccttcaacggactcgacaagggagagccggtcaacgaggcagacgccgcggccctcgagcacgacaaagcctacgaccggcagctcgacagcggagacaacccgtacctcaagtacaaccacgccgacgcggagtttcaggagcgccttaaagaagatacgtcttttgggggcaacctcgggcgggcagtcttccaggccaagaagcgggttctcgaacctctcggtctggttgaggaaggcgctaagacggctcctggaaagaaacgtccggtagagcagtcgccacaagagccagactccccctcgggcatcggcaagacaggccagcagcccgctaaaaagagactcaattttggtcagactggcgactcagagtcagtccccgatccacaacctctcggagaacctccagcaacccccgctgctgtgggacctactacaatggcttcaggcggtggcgcaccaatggcagacaataacgaaggcgccgacggagtgggtaatgcctcaggaaattggcactgcgattccacatggctgggcgacagagtcatcaccaccagcacccgcacctgggccttgcccacctacaataaccacctctacaagcaaatctccagtgcttcaacgggggccagcaacgacaaccactacttcggctacagcaccccctgggggtattttgatttcaacagattccactgccacttttcaccacgtgactggcagcgactcatcaacaacaattggggattccggcccaagagactcaacttcaaactcttcaacatccaagtcaaggaggtcacgacgaatgatggcgtcacaaccatcgctaataaccttaccagcacggttcaagtcttctcggactcggagtaccagcttccgtacgtcctcggctctgcgcaccagggccgcctccctccgttcccggcggacgtgttcatgattccgcaatacggctacctgacgctcaacaatggcagccaagccgtgggacgttcatcctcttactgcctggaatatttcccttctcagatgctgagaacgggcaacaactttaccttcagctacacctttgaggaagtgcctctccacagcagctgcgcgcacagccagagcctggaccggctgatgaatcctctcatcgaccaatacctgtattacctgaacagaactcaaaatcagtccggaagtgcccaaaacagggacttgctgttcagccgtgggtctccagctggcatgtctgttcagcccaaaaactggctacctggaccctgttatcggcagcagcgcgtttctaaaacaaaaacagacaacaacaacagcaattttacctggactggtgcttcaaaatataacctcaatgggcgtgaatccatcatcaaccctggcactgctatggcctcacacaaagacgacgaagacaagttctttcccatgagcggtgtcatgatttttggaaaagagagcgccggagcttcaaacactgcattggacaatgtcatgattacagacgaagaggaaattaaagccactaaccctgtggccaccgaaagatttgggaccgtggcagtcaatttccagagcagcagcacagaccctgcgaccggagatgtgcatgctatgggagcattacctggcatggtgtggcaagatagagacgtgtacctgcagggtcccatttgggccaaaattcctcacacagatggacactttcacccgtctcctcttatgggcggctttggactcaagaacccgcctcctcagatcctcatcaaaaacacgcctgttcctgcgaatcctccggcggagttttcagctacaaagtttgcttcattcatcacccaatactccgcaggacaagtgagtgtggaaattgaatgggagctgcagaaagaaaacagcaagcgctggaatcccgaagtgcagtacacatccaattatgcaaaatctgccaacgttgattttactgtggacaacaatggactttatactgagcctcgccccattggcacccgttaccttacccgtcccctgtaa

SEQ ID NO: 299 - protein, 736 aa, Adeno-associated virus
MAADGYLPDWLEDTLSEGIRQWWKLKPGPPPPKPAERHKDDSRGLVLPGYKYLGPFNGLDKGEPVNEADAAALEHDKAYDRQLDSGDNPYLKYNHADAEFQERLKEDTSFGGNLGRAVFQAKKRVLEPLGLVEEGAKTAPGKKRPVEQSPQEPDSPSGIGKTGQQPAKKRLNFGQTGDSESVPDPQPLGEPPATPAAVGPTTMASGGGAPMADNNEGADGVGNASGNWHCDSTWLGDRVITTSTRTWALPTYNNHLYKQISSASTGASNDNHYFGYSTPWGYFDFNRFHCHFSPRDWQRLINNNWGFRPKRLNFKLFNIQVKEVTTNDGVTTIANNLTSTVQVFSDSEYQLPYVLGSAHQGRLPPFPADVFMIPQYGYLTLNNGSQAVGRSSSYCLEYFPSQMLRTGNNFTFSYTFEEVPLHSSCAHSQSLDRLMNPLIDQYLYYLNRTQNQSGSAQNRDLLFSRGSPAGMSVQPKNWLPGPCYRQQRVSKTKTDNNNSNFTWTGASKYNLNGRESIINPGTAMASHKDDEDKFFPMSGVMIFGKESAGASNTALDNVMITDEEEIKATNPVATERFGTVAVNFQSSSTDPATGDVHAMGALPGMVWQDRDVYLQGPIWAKIPHTDGHFHPSPLMGGFGLKNPPPQILIKNTPVPANPPAEFSATKFASFITQYSAGQVSVEIEWELQKENSKRWNPEVQYTSNYAKSANVDFTVDNNGLYTEPRPIGTRYLTRPL

SEQ ID NO: 300 - protein, 736 aa, Adeno-associated virus
MAADGYLPDWLEDTLSEGIRQWWKLKPGPPPPKPAERHKDDSRGLVLPGYKYLGPFNGLDKGEPVNEADAAALEHDKAYDRQLDSGDNPYLKYNHADAEFQERLKEDTSFGGNLGRAVFQAKKRVLEPLGLVEEGAKTAPGKKRPVEQSPQEPDSSSGIGKTGQQPAKKRLNFGQTGDSESVPDPQPLGEPPATPAAVGPTTMASGGGAPMADNNEGADGVGNASGNWHCDSTWLGDRVITTSTRTWALPTYNNHLYKQISSASTGASNDNHYFGYSTPWGYFDFNRFHCHFSPRDWQRLINNNWGFRPKRLNFKLFNIQVKEVTTNDGVTTIANNLTSTVQVFSDSEYQLPYVLGSAHQGCLPPFPADVFMIPQYGYLTLNNGSQAVGRSSFYCLEYFPSQMLRTGNNFTFSYTFEEVPLHSSCAHSQSLDRLMNPLIDQYLYYLNRTQNQSGSAQNRDLLFSRGSPAGMSVQPKNWLPGPCYRQQRVSKTKTDNNNSNFTWTGASKYNLNGRESIINPGTAMASHKDDEDKFFPMSGVMIFGKESAGASNTALDNVMITDEEEIKATNPVATERFGTVAVNFQSSSTDPATGDVHAMGALPGMVWQDRDVYLQGPIWAKIPHTDGHFHPSPLMGGFGLKNPPPQILIKNTPVPANPPAEFSATKFASFITQYSTGQVSVEIEWELQKENSKRWNPEVQYTSNYAKSANVDFTVDNNGLYTEPRPIGTRYLTRPL

SEQ ID NO: 301 - DNA, 2208 bp, Adeno-associated virus
  source 1..2208: mol_type = unassigned DNA
atggctgccgatggctatcttccagattggctcgaggacactctctctgaaggaataagacagtggtggaagctcaaacctggcccaccaccaccaaagcccgcagagcggcatagggacgacagcaggggtcttgtgcttcctgggtacaagtacctcggacccttcaacggactcgacaagggagagccggtcaacgaggcagacgccgcggccctcgagcacgacaaagcctacgaccggcagctcgacagcggagacaacccgtacctcaagtacaaccacgccgacgcggagtttcaggagcgccttaaagaagatacgtcttttgggggcaacctcggacgagcagtcttccaggcgaaaaagagggttcttgaacctctgggcctggttggggaacctgttaagacggctccgggaaaaaagaggccggtagagcactctcctgtggagccagactcctcctcgggaaccggaaaggcgggccagcagcctgcaagaaaaagattgaattttggtcagactggagacgcagactcagtacctgacccccagcctctcggacagccaccagcagccccctctggtctgggaactaatacgatggctacaggcagtggcgcaccaatggcagacaataacgagggcgccgacggagtgggtaattcctcgggaaattggcattgcgattccacatggatgggcgacagagtcatcaccaccagcacccgaacctgggccctgcccacctacaacaaccacctctacaaacaaatttccagccaatcaggagcctcgaacgacagtcactactttggctacagcaccccttgggggtattttgacttcaacagattccactgccacttttcaccacgtgactggcaaagactcatcaacaacaactggggattccgacccaagagactcaacttcaagctctttaacattcaagtcaaagaggtcacgcagaatgacggtacgacgacgattgccaataaccttaccagcacggttcaggtgtttactgactcggagtaccagctcccgtacgtcctcggctcggcgcatcaaggatgcctcccgccgttcccagcagacgtcttcatggtgccacagtatggatacctcaccctgaacaacgggagtcaggcagtaggacgctcttcattttactgcctggagtactttccttctcagatgctgcgtaccggaaacaactttaccttcagctacacttttgaggacgttcctttccacagcagctacgctcacagccagagtctggaccgtctcatgaatcctctcatcgaccagtacctgtattacttgagcacaacaaacactccaagtggaaccaccacgcagtcaaggctccagttttctcaggccggagcgagtgacattcgggaccagtctaggaactggcttcctggaccctgttaccgccagcagcgagtatcaaagacatctgcggataacaacaacagtgaatactcgtggactggagctaccaagtaccacctcaatggcagagactctctggtgaatccgggcccggccatggcaagccacaaggacaatgaagaaaagttttttcctcagagcggggttctcatctttgggaagcaaggctcagagaaaacaaatgtggacattgaaaaggtcatgattacagacgaagaggaaatcaggacaaccaatcccgtggctacggagcagtatggttctgtatctaccaacctccagagaggcaacagacaagcagctaccgcagatgtcaacacacaaggcgttcttccaggcatggtctggcaggacagagatgtgtaccttcaggggcccatctgggcaaagattccacacacggacggacattttcacccctctcccctcatgggtggattcggacttaaacaccctcctccacagattctcatcaagaacaccccggtacctgcgaatccttcgaccaccttcagtgcggcaaagtttgcttccttcatcacacagtactccacgggacaggtcagcgtggagatcgagtgggagctgcagaaggaaaacagcaaacgctggaatcccgaaattcagtacacttccaactacaacaagtctgttaatgtggactttactgtggacactaatggcgtgtattcagagcctcgccccattggcaccagatacctgactcgtaatctgtaa

SEQ ID NO: 302 - protein, 735 aa, Adeno-associated virus
MAADGYLPDWLEDTLSEGIRQWWKLKPGPPPPKPAERHRDDSRGLVLPGYKYLGPFNGLDKGEPVNEADAAALEHDKAYDRQLDSGDNPYLKYNHADAEFQERLKEDTSFGGNLGRAVFQAKKRVLEPLGLVGEPVKTAPGKKRPVEHSPVEPDSSSGTGKAGQQPARKRLNFGQTGDADSVPDPQPLGQPPAAPSGLGTNTMATGSGAPMADNNEGADGVGNSSGNWHCDSTWMGDRVITTSTRTWALPTYNNHLYKQISSQSGASNDSHYFGYSTPWGYFDFNRFHCHFSPRDWQRLINNNWGFRPKRLNFKLFNIQVKEVTQNDGTTTIANNLTSTVQVFTDSEYQLPYVLGSAHQGCLPPFPADVFMVPQYGYLTLNNGSQAVGRSSFYCLEYFPSQMLRTGNNFTFSYTFEDVPFHSSYAHSQSLDRLMNPLIDQYLYYLSTTNTPSGTTTQSRLQFSQAGASDIRDQSRNWLPGPCYRQQRVSKTSADNNNSEYSWTGATKYHLNGRDSLVNPGPAMASHKDNEEKFFPQSGVLIFGKQGSEKTNVDIEKVMITDEEEIRTTNPVATEQYGSVSTNLQRGNRQAATADVNTQGVLPGMVWQDRDVYLQGPIWAKIPHTDGHFHPSPLMGGFGLKHPPPQILIKNTPVPANPSTTFSAAKFASFITQYSTGQVSVEIEWELQKENSKRWNPEIQYTSNYNKSVNVDFTVDTNGVYSEPRPIGTRYLTRNL

SEQ ID NO: 303 - protein, 737 aa, Adeno-associated virus
RMAADGYLPDWLEDNLSEGIREWWDLKPGAPKPKANQQKQDDGRGLVLPGYKYLGPFNGLDKGEPVNAADAAALEHDKAYDQQLKAGDNPYLRYNHADAEFQERLQEDTSFGGNLGRAVFQAKKRVLEPLGLVEEGAKTAPGKKRPVEQSPQEPDSSSGIGKTGQQPAKKRLNFGQTGDSESVPDPQPLGEPPATPAAVGPTTMASGGGAPMADNNEGADGVGNASGNWHCDSTWLGDRVITTSTRTWALPTYNNHLYKQISSTSTGASNDNHYFGYGTPWGYFDFNRFHCHFSPRDWQRLINNNWGFRPKRLNFKLFNIQVEEVTTNDGVTTIANNLTSTVQVFSDSEYQLPYVLGSAHQGCLPPFPADVFMIPQYGYLTLNNGSQAVGRSSFYCLEYFPSQMLRTGNNFTFSYTFEEVPFHSSYAHSQSLDRLMNPLIDQYLYYLNRTQNQSGSAQNKDLLFSRGSPAGMSVQPKNWLPGPCYRQQRVSKTKTDNNNSNFTWTGASKYNLNGRESIINPGTAVASHKDDEDKFFPMSGVMIFGKESAGASSTALDNVMITDEEEIKATNPVATERFGTVAVNFQSSSTDPATGDVHAMGALPGMVWQDRDVYLQGPIWAKIPHTDGHFHPSPLMGGFGLKNPPPQILIKNTPVPANPPAEFSATKFASFITQYSTGQVSVEIEWELQKENSKRWNPEVQYTSNYAKSANVDFTVDNNGLYTEPRPIGTRYLTRPL

SEQ ID NO: 304 - protein, 736 aa, Adeno-associated virus
MAADGYLPDWLEDNLSEGIREWWDLKPGAPKPKANQQKQDDGRGLVLPGYKYLGPFNGLDKGEPVNAADAAALEHDKAYDQQLKAGDNPYLRYNHADAEFQERLQEDTSFGGNLGRAVFQAKKRVLEPLGLVEEGAKTAPGKKRPVEQSPQEPDSSSGIGKTGQQPAKKRLNFGQTGDSESVPDPQPLGEPPATPAAVGPTTMASGGGAPMADNNEGADGVGNASGNWHCDSTWLGDRVITTSTRTWALPTYNNHLYKQISSTSTGASNDNHYFGYGTPWGYFDFNRFHCHFSPRDWQRLINNNWGFRPKRLNFKLFNIQVEEVTTNDGVTTIANNLTSTVQVFSDSEYQLPYVLGSAHQGCLPPFPADVFMIPQYGYLTLNNGSQAVGRSSFYCLEYFPSQMLRTGNNFTFSYTFEEVPFHSSYAHSQSLDRLMNPLIDQYLYYLNRTQNQSGSAQNKDLLFSRGSPAGMSVQPKNWLPGPCYRQQRVSKTKTDNNNSNFTWTGASKYNLNGRESIINPGTAVASHKDDEDKFFPMSGVMIFGKESAGASSTALDNVMITDEEEIKATNPVATERFGTVAVNFQSSSTDPATGDVHAMGALPGMVWQDRDVYLQGPIWAKIPHTDGHFHPSPLMGGFGLKNPPPQILIKNTPVPANPPAEFSATKFASFITQYSTGQVSVEIEWELQKENSKRWNPEVQYTSNYAKSANVDFTVDNNGLYTEPRPIGTRYLTRPL

SEQ ID NO: 305 - DNA, 2211 bp, Adeno-associated virus
  source 1..2211: mol_type = unassigned DNA
atggctgccgatggttatcttccagattggctcgaggacaacctctctgagggcattcgcgagtggtgggacttgaaacctggagccccgaagcccaaagccaaccagcaaaagcaggacgacggccggggtctggtgcttcctggctacaagtacctcggacccttcaacggactcgacaagggggagcccgtcaacgcggcggacgcagcggccctcgagcacgacaaggcctacgaccagcagctcaaagcgggtgacaatccgtacctgcggtataaccacgccgacgccgagtttcaggagcgtctgcaagaagatacgtcttttgggggcaacctcgggcgagcagtcttccaggccaagaagcgggttctcgaacctctcggtctggttgaggaaggcgctaagacggctcctggaaagaaacgtccggtagagcagtcgccacaagagccagactcctcctcgggcatcggcaagacaggccagcagcccgctaaaaagagactcaattttggccagactggcgactcagagtcagtccccgatccacaacctctcggagaacctccagcaacccccgctgctgtgggacctactacaatggcttcaggcggtggcgcaccaatggcagacaataacgaaggcgccgacggagtgggtaatgcctcaggaaattggcattgcgattccacatggctgggcgacagagtcatcaccaccagcacccgcacctgggccttgcccacctacaataaccacctctacaagcaaatctccagtacttcaacgggggccagcaacgacaaccactacttcggctacggcaccccctgggggtattttgatttcaacagattccactgccacttttcaccacgtgactggcagcgactcatcaacaacaattggggattccggcccaagagactcaacttcaaactcttcaacatccaagtcgaggaggtcacgacgaatgatggcgtcacaaccatcgctaataaccttaccagcacggttcaagtcttctcggactcggagtaccagcttccgtacgtcctcggctctgcgcaccagggctgcctccctccgttcccggcggacgtgttcatgattccgcaatacggctacctgacgctcaacaatggcagccaagccgtgggacgttcatccttttactgcctggaatatttcccttctcagatgctgagaacgggcaacaactttaccttcagctacacctttgaggaagtgcctttccacagcagctacgcgcacagccagagcctggaccggctgatgaatcctctcatcgaccaatacctgtattacctgaacagaacacaaaatcagtccggaagtgcccaaaacaaggacttgctgtttagccgtgggtctccagctggcatgtctgttcagcccaaaaactggctacctggaccctgttatcggcagcagcgcgtttctaaaacaaaaacagacaacaacaacagcaattttacctggactggtgcttcaaaatataacctcaatgggcgtgaatccatcatcaaccctggcaccgctgtggcctcacacaaagacgacgaagacaagttctttcccatgagcggtgtcatgatttttggaaaagagagcgccggagcttcaagcactgcattggacaatgtcatgattacagacgaagaggaaattaaagccactaaccctgtggccaccgaaagatttgggaccgtggcagtcaatttccagagcagcagcacagaccctgcgaccggagatgtgcatgctatgggagcattacctggcatggtgtggcaagatagagacgtgtacctgcagggtcccatttgggccaaaattcctcacacagatggacactttcacccgtctcctcttatgggcggctttggactcaagaacccgcctcctcagatcctcatcaaaaacacgcctgttcctgcgaatcctccggcggagttttcagctacaaagtttgcttcattcatcacccaatactccacaggacaagtgagtgtggaaattgaatgggagctgcagaaagaaaacagcaagcgctggaatcccgaagtgcagtacacatccaattatgcaaaatctgccaacgttgattttactgtggacaacaatggactttatactgagcctcgccccattggcacccgttaccttacccgtcccctgtaa

SEQ ID NO: 306 - protein, 737 aa, Adeno-associated virus
RMAADGYLPDWLEDNLSEGIREWWDLKPGAPKPKANQQKQDDGRGLVLPGYKYLGPFNGLDKGEPVNAADAAALEHDKAYDQQLKAGDNPYLRYNHADAEFQERLQEDTSFGGNLGRAVFQAKKRVLEPLGLVEEGAKTAPGKKRPVEQSPQEPDSSSGIGKTGQQPAKKRLNFGQTGDSESVPDPQPLGEPPATPAAVGPTTMASGGGAPMADNNEGADGVGNASGNWHCDSTWLGDRVITTSTRTWALPTYNNHLYKQISSTSTGASNDNHYFGYSTPWGYFDFNRFHCHFSPRDWQRLINNNWGFRPKRLNFKLFNIQVEEVTTNDGVTTIANNLTSTVQVFSDSEYQLPYVLGSAHQGCLPPFPADVFMIPQYGYLTLNNGSQAVGRSSFYCLEYFPSQMLRTGNNFTFSYTFEEVPFHSSYAHSQSLDRLMNPLIDQYLYYLNRTQNQSGSAQNKDLLFSRGSPAGMSVQPKNWLPGPCYRQQRVSKTKTDNNNSNFTWTGASKYNLNGRESIINPGTAVASHKDDEDKFFPMSGVMIFGKESAGASSTALDNVMITDEEEIKATNPVATERFGTVAVNFQSSSTDPATGDVHAMGALPGMVWQDRDVYLQGPIWAKIPHTDGHFHPSPLMGGFGLKNPPPQILIKNTPVPANPPAEFSATKFASFITQYSTGQVSVEIEWELQKENSKRWNPEVQYTSNYAKSANVDFTVDNNGLYTEPRPIGTRYLTRPL

SEQ ID NO: 307 - protein, 737 aa, Adeno-associated virus
RMAADGYLPDWLEDNLSEGIREWWDLKPGAPKPKANQQKQDDGRGLVLPGYKYLGPFNGLDKGEPVNAADAAALEHDKAYDQQLKAGDNPYLRYNHADAEFQERLQEDTSFGGNLGRAVFQAKKRVLEPLGLVEEGAKTAPGKKRPVEQSPQEPDSSSGIGKTGQQPAKKRLNFGQTGDSESVPDPQPLGEPPATPAAVGPTTMASGGGAPMADNNEGADGVGNASGNWHCDSTWLGDRVITTSTRTWALPTYNNHLYKQISSTSTGASNDNHYFGYSTPWGYFDFNRFHCHFSPRDWQRLINNNWGFRPKRLNFKLFNIQVKEVTTNDGVTTIANNLTSTVQVFSDSEYQLPYVLGSAHQGCLPPFPADVFMIPQYGYLTLNNGSQAVGRSSFYCLEYFPSQMLRTGNNFTFSYTFEEVPFHSSYAHSQSLDRLMNPLIDQYLYYLNRTQNQSGSAQNKDLLFSRGSPAGMSVQPKNWLPGPCYRQQRVSKTKTDNNNSNFTWTGASKYNLNGRESIINPGTAVASHKDDEDKFFPMSGVMIFGKESAGASSTALDNVMITDEEEIKATNPVATERFGTVAVNFQSSSTDPATGDVHAMGALPGMVWQDRDVYLQGPIWAKIPHTDGHFHPSPLMGGFGLKNPPPQILIKNTPVPANPPAEFSATKFASFITQYSTGQVSVEIEWELQKENSKRWNPEVQYTSNYAKSANVDFTVDNNGLYTEPRPIGTRYLTRPL

SEQ ID NO: 308 - protein, 737 aa, Adeno-associated virus
RMAADGYLPDWLEDNLSEGIREWWDLKPGAPKPKANQQKQDDGRGLVLPGYKYLGPFNGLDKGEPVNAADAAALEHDKAYDQQLKAGDNPYLRYNHADAEFQERLQEDTSFGGNLGRAVFQAKKRVLEPLGLVEEGAKTAPGKKRPVEQSPQEPDSSSGIGKTGQQPAKKRLNFGQTGDSESVPDPQPLGEPPATPAAVGPTTMASGGGAPMADNNEGADGVGNASGNWHCDSTWLGDRVITTSTRTWALPTYNNHLYKQISSTSTGASNDNHYFGYSTPWGYFDFNRFHCHFSPRDWQRLINNNWGFRPKRLNFKLFNIQVKEVTTNDGVTTIANNLTSTVQVFSDSEYQLPYVLGSAHQGCLPPFPADVFMIPQYGYLTLNNGSQAVGRSSFYCLEYFPSQMLRTGNNFTFSYTFEEVPFHSSYAHSQSLDRLMNPLIDQYLYYLNRTQNQSGSAQNKDLLFSRGSPAGMSVQPKNWLPGPCYRQQRVSKTKTDNNNSNFTWTGASKYNLNGRESIINPGTAVASHKDDEDKFFPMSGVMIFGKESAGANSTALDNVMITDEEEIKATNPVATERFGTVAVNFQSSSTDPATGDVHAMGALPGMVWQDRDVYLQGPIWAKIPHTDGHFHPSPLMGGFGLKNPPPQILIKNTPVPANPPAEFSATKFASFITQYSTGQVSVEIEWELQKENSKRWNPEVQYTSNYAKSANVDFTVDNNGLYTEPRPIGTRYLTRPL

SEQ ID NO: 309 - DNA, 2208 bp, Adeno-associated virus
  source 1..2208: mol_type = unassigned DNA
atggctgccgatggttatcttccagattggctcaaggacactctctctgaaggaataagacagtggtggaagctcaaacctggcccaccaccaccaaagcccgcagagcggcataaggacgacagcgggggtcttgtgcttcctgggtacaagtacctcggacccttcaacggactcgacaagggagagccggtcaacgaggcagacgccgcggccctcgagtacgacaaggcctacgaccggcagctcgacagcggagacaacccgtacctcaagtacaaccacgccgacgcggagtttcaggagcgccttaaagaagatacgtcttttgggggcaacctcggacgagcagtcttccaggcgaaaaagagggttcttgaacctctgggcctggttgaggaacctgttaagacggctccgggaaaaaagaggccggtagagcactctcctgtggagccagactcctcctcgggaacaggaaaagcgggccagcagcctgcgagaaagagattgaattttggtcagactggagacgcagactccgtacctgacccccagcctctcggacagccaccagcagccccctctggtctgggaactaatacgatggctacaggcagtggcgcaccaatggcagacaataacgagggcgccgacggagtgggtaattcctcgggaagttggcattgcgattccacatggatgggcgacagagtcatcaccaccagcacccgaacctgggctctgcccacctacaacaaccatctgtacaagcagatctccagccaatcaggagccagcaacgacaaccactactttggctacagcaccccttgggggtattttgacttcaacagattccactgccacttttcaccacgtgactggcaaagactcatcaacaacaactggggattccggcccaagagactcaacttcaagctctttaacattcaagtcaaggaggtcacgcagaatgacggtacgacgacgattgccaataaccttaccagcacggttcaggtgtttactgactcggagtaccagctcccgtacgtccccggctcggcgcatcaaggatgcctcccgccgttcccagcagacgtcttcatggtgccacagtatggatacctcaccctgaacaacgggagtcaggcagtaggacgctcttcattttactgcctggagtactttccttctcagatgcttcgtaccggaaacaactttaccttcagctacacctttgaggatgttcctttccacagcagctacgctcacagccagagtttggaccgtctcatgaatcctctcatcgaccagtacctgtattacttgagcagaacaaacactccaagcggaaccaccacgcagtccaggcttcagttttctcaggccggagcaagtgacattcgggaccagtctaggaactggcttcctggaccctgttaccgccagcagcgagtatcaaagacagctgcggacaacaacaacagtgaatactcgtggactggagctaccaagtaccacctcaatggcagagactctctggtgaatccgggcccggccatggccagccacaaggacgatgaagaaaagttttttcctcaaagcggggttctcatctttgggaagcaaggctcagagaaaacaaatgtggacattgaaaaggtcatgattacagacgaagaggaaatcagaaccaccaatcccgtggccacggagcagtatggttctgtatctaccaacctccagagcggcaacacacaagcagctactgcagatgtcaacacacaaggcgttcttccaggcatggtctggcaggacagagacgtgcacctgcaggggcctatctgggcaaagattccacacacggacggacattttcacccctctcccctcatgggcggatttggacttaaacaccctcctccacagattctcatcaagaacaccccggtacctgcaaatccttcgaccaccttcagtgcggcaaagtttgcttccttcatcacacagtattccacagggcaggtcagcgtggagatcgagtgggagctgcagaaggagaacagcaaacgctggaaccccgagatccagtacacttccaactacaacaaatctgttaatgtggactttactgtggacactaatggtgtgtattcagagcctcgccccattggcaccagatacctgactcgtaatctgtaa

SEQ ID NO: 310 - protein, 735 aa, Adeno-associated virus
MAADGYLPDWLKDTLSEGIRQWWKLKPGPPPPKPAERHKDDSGGLVLPGYKYLGPFNGLDKGEPVNEADAAALEYDKAYDRQLDSGDNPYLKYNHADAEFQERLKEDTSFGGNLGRAVFQAKKRVLEPLGLVEEPVKTAPGKKRPVEHSPVEPDSSSGTGKAGQQPARKRLNFGQTGDADSVPDPQPLGQPPAAPSGLGTNTMATGSGAPMADNNEGADGVGNSSGSWHCDSTWMGDRVITTSTRTWALPTYNNHLYKQISSQSGASNDNHYFGYSTPWGYFDFNRFHCHFSPRDWQRLINNNWGFRPKRLNFKLFNIQVKEVTQNDGTTTIANNLTSTVQVFTDSEYQLPYVPGSAHQGCLPPFPADVFMVPQYGYLTLNNGSQAVGRSSFYCLEYFPSQMLRTGNNFTFSYTFEDVPFHSSYAHSQSLDRLMNPLIDQYLYYLSRTNTPSGTTTQSRLQFSQAGASDIRDQSRNWLPGPCYRQQRVSKTAADNNNSEYSWTGATKYHLNGRDSLVNPGPAMASHKDDEEKFFPQSGVLIFGKQGSEKTNVDIEKVMITDEEEIRTTNPVATEQYGSVSTNLQSGNTQAATADVNTQGVLPGMVWQDRDVHLQGPIWAKIPHTDGHFHPSPLMGGFGLKHPPPQILIKNTPVPANPSTTFSAAKFASFITQYSTGQVSVEIEWELQKENSKRWNPEIQYTSNYNKSVNVDFTVDTNGVYSEPRPIGTRYLTRNL

SEQ ID NO: 311 - DNA, 2208 bp, Adeno-associated virus
  source 1..2208: mol_type = unassigned DNA
atggctgccgatggttatcttccagattggctcgaggacactctctctgaaggaataagacagtggtggaagctcaaacctggcccaccaccaccaaagcccgcagagcggcataaggacgacagcaggggtcttgtgcttcctgggtacaagtacctcggacccttcaacggactcgacaagggggagccggtcaacgaggcagacgccgcggccctcgagcacgacaaggcctacgaccggcagctcgacagcggagacaacccgtacctcaagtacaaccacgccgacgcagagtttcaggagcgccttaaagaagatacgtcttttgggggcaacctcggacgagcagtcttccaggcgaaaaagagggttcttgaacctctgggcctggttgaggaacctgttaagacggctccgggaaaaaagaggccggtagagcactctcctgtggagccagactcctcctcgggaaccggaaaagcgggccagcagcctgcaagaaaaagattaaattttggtcagactggagacgcagactccgtacctgacccccagcctctcggacagccaccagcagccccctctggtctgggatctactacaatggctacaggcagtggcgcaccaatggcagacaataacgagggtgccgatggagtgggtaattcctcaggaaattggcattgcgattcccaatggctgggcgacagagtcatcaccaccagcacccgaacctgggccctgcccacatacaacaaccacctctacaagcaaatctccagccaatcaggagccagcaacgacaaccactactttggctacagcaccccctgggggtattttgacttcaacagattccactgccacttttcaccacgtgactggcaaagactcatcaacaacaactggggattccggcccaaaagactcaacttcaagctctttaatattcaagtcaaagaggtcacgcagaatgacggtacgacgacgattgccaataaccttaccagcacggttcaggtgtttactgactcggagtaccagctcccgtacgtcctgggctcggcgcatcaaggatgcctcccgccgtttccagcggacgtcttcatggtcccacagtatggatacctcaccctgaacaacgggagtcaggcggtaggacgctcttccttttactgcctggagtactttccttctcagatgctgcgtactggaaacaactttcagttcagctacacttttgaagacgtgcctttccacagcagctacgctcacagccagagtctggatcggctgatgaatcctctgatcgaccagtacctgtattatctgaacaagacacaaacaaatagtggaactcttcagcagtctcggctactgtttagccaagctggaccaaccaacatgtctcttcaagctaaaaactggctgcctggaccttgctacagacagcagcgtctgtcaaaacaggcaaacgacaacaacaacagcaactttccctggactgcagctacaaagtatcatctaaatggccgggactcgttggttaatccaggaccagctatggccagtcgcaaggatgacgaagaaaagtttttccccatgcatggaaccctgatatttggtaaacaaggaacaaatgccaacgacgcggatttggaaaatgtcatgattacagatgaagaagaaatcagggccaccaatcccgtggctacggagcagtacgggactgtgtcaaataatttgcaaaactcaaacactggtccaactactggaactgtcaatcaccaaggagcgttacctggtatggtgtggcaggatcgagacgtgtacctgcagggacccatttgggccaagattcctcacaccgatggacactttcatccttctccactgatgggaggttttggactcaaacacccgcctcctcagatcatgatcaaaaacactcccgttccagccaatcctcccacaaacttcagttctgccaagtttgcttctttcatcacacagtattccacgggacaggtcagcgtggagatcgagtgggagctgcagaaggagaacagcaaacgctggaatcccgaaattcagtacacttccaactacaacaagtctgttaatgtggactttactgtggacactaatggtgtgtattcagagcctcgccccattggcaccagatacctgactcgtaatctgtaa

SEQ ID NO: 312 - protein, 735 aa, Adeno-associated virus
MAADGYLPDWLEDTLSEGIRQWWKLKPGPPPPKPAERHKDDSRGLVLPGYKYLGPFNGLDKGEPVNEADAAALEHDKAYDRQLDSGDNPYLKYNHADAEFQERLKEDTSFGGNLGRAVFQAKKRVLEPLGLVEEPVKTAPGKKRPVEHSPVEPDSSSGTGKAGQQPARKRLNFGQTGDADSVPDPQPLGQPPAAPSGLGSTTMATGSGAPMADNNEGADGVGNSSGNWHCDSQWLGDRVITTSTRTWALPTYNNHLYKQISSQSGASNDNHYFGYSTPWGYFDFNRFHCHFSPRDWQRLINNNWGFRPKRLNFKLFNIQVKEVTQNDGTTTIANNLTSTVQVFTDSEYQLPYVLGSAHQGCLPPFPADVFMVPQYGYLTLNNGSQAVGRSSFYCLEYFPSQMLRTGNNFQFSYTFEDVPFHSSYAHSQSLDRLMNPLIDQYLYYLNKTQTNSGTLQQSRLLFSQAGPTNMSLQAKNWLPGPCYRQQRLSKQANDNNNSNFPWTAATKYHLNGRDSLVNPGPAMASRKDDEEKFFPMHGTLIFGKQGTNANDADLENVMITDEEEIRATNPVATEQYGTVSNNLQNSNTGPTTGTVNHQGALPGMVWQDRDVYLQGPIWAKIPHTDGHFHPSPLMGGFGLKHPPPQIMIKNTPVPANPPTNFSSAKFASFITQYSTGQVSVEIEWELQKENSKRWNPEIQYTSNYNKSVNVDFTVDTNGVYSEPRPIGTRYLTRNL

SEQ ID NO: 313 - DNA, 2208 bp, Adeno-associated virus
  source 1..2208: mol_type = unassigned DNA
atggctgccgatggttatcttccagattggctcgaggacactctctctgaaggaataagacagtggtggaagctcaaacctggcccaccaccaccaaagcccgcagagcggcataaggacgacagcaggggtcttgtgcttcctgggtacaagtacctcggacccttcaacggactcgacaagggagagccggtcaacgaggcagacgccgcggccctcgagcacgacaaagcctacgaccggcagctcgacagcggagacaacccgtacctcaagtacaaccacgccgacgcggagtttcaggagcgccttaaagaagatacgtcttttgggggcaacctcggacgagcagtcttccaggcgaaaaagagggttcttgaacctctgggcctggttggggaacctgtcaagacggctccaggaaaaaagaggccggtagagcactctcctgtggagccagactcctcctcgggaaccggaaaggcgggccagcagcctgcaagaaaaagattgaattttggtcagactggagacgcagactcagtacctgacccccagcctctcggacagccaccagcagccccctctggtctgggaactaatacgatggctacaggcagtggcgcaccaatggcagacaataacgagggcgccgacggagtgggtaattcctcgggaaattggcattgcgattccacatggatgggcgacagagtcatcaccaccagcacccgaacctgggccctgcccacctacaacaaccacctctacaaacaaatttccagccaatcaggagcctcgaacgacaatcactactttggctacagcaccccttgggggtattttgacttcaacagattccactgccacttttcaccacgtgactggcaaagactcatcaacaacaactggggattccgacccaagagactcaacttcaagctctttaacattcaagtcaaagaggtcacgcagaatgacggtacgacgacgattgccaataaccttaccagcacggttcaggtgtttactgactcggagtaccagctcccgtacgtcctcggctcggcgcatcaaggatgcctcccgccgttcccagcagacgtcttcatggtgccacagtatggatacctcaccctgaacaacgggagtcaggcagtaggacgctcttcattttactgcctggagtactttccttctcagatgctgcgtaccggaaacaactttaccttcagctacacttttgaggacgttcctttccacagcggctacgctcacagccagagtctggaccgtctcatgaatcctctcatcgaccagtacctgtattacttgagcacaacaaacactccaagtggaaccaccacgcagtcaaggcttcagttttctcaggccggagcgagtgacattcgggaccagtctaggaactggcttcctggaccctgttaccgccagcagcgagtatcaaagacatctgcggataacaacaacagtgaatactcgtggactggagctaccaagtaccacctcaatggcagagactctctggtgaatccgggcccggccatggcaagccacaaggacaatgaagaaaagttttttcctcagagcggggttctcatctttgggaagcaaggctcagagaaaacaaatgtggacattgaaaaggtcatgattacagacgaagaggaaatcaggacaaccaatcccgtggctacggagcagtacggttctgtatctaccaacctccagagaggcaacagacaagcagctaccgcagatgtcaacacacaaggcgttcttccaggcatggtctggcaggacagagatgtgtaccttcaggggcccatctgggcaaagattccacacacggacggacattttcacccctctcccctcatgggtggattcggacttaaacaccctcctccacagattctcatcaagaacaccccggtacctgcgaatccttcgaccaccttcagtgcggcaaagtttgcttccttcatcacacagtactccacgggacaggtcagcgtggagatcgagtgggagctgcagaaggaaaacagcaaacgctggaatcccgaaattcagtacacttccaactacaacaagtctgttaatgtggactttactgtggacactaatggcgtgtattcagagcctcgccccattggcaccagatacctgactcgtaatctgtaa

SEQ ID NO: 314 - protein, 735 aa, Adeno-associated virus
MAADGYLPDWLEDTLSEGIRQWWKLKPGPPPPKPAERHKDDSRGLVLPGYKYLGPFNGLDKGEPVNEADAAALEHDKAYDRQLDSGDNPYLKYNHADAEFQERLKEDTSFGGNLGRAVFQAKKRVLEPLGLVGEPVKTAPGKKRPVEHSPVEPDSSSGTGKAGQQPARKRLNFGQTGDADSVPDPQPLGQPPAAPSGLGTNTMATGSGAPMADNNEGADGVGNSSGNWHCDSTWMGDRVITTSTRTWALPTYNNHLYKQISSQSGASNDNHYFGYSTPWGYFDFNRFHCHFSPRDWQRLINNNWGFRPKRLNFKLFNIQVKEVTQNDGTTTIANNLTSTVQVFTDSEYQLPYVLGSAHQGCLPPFPADVFMVPQYGYLTLNNGSQAVGRSSFYCLEYFPSQMLRTGNNFTFSYTFEDVPFHSGYAHSQSLDRLMNPLIDQYLYYLSTTNTPSGTTTQSRLQFSQAGASDIRDQSRNWLPGPCYRQQRVSKTSADNNNSEYSWTGATKYHLNGRDSLVNPGPAMASHKDNEEKFFPQSGVLIFGKQGSEKTNVDIEKVMITDEEEIRTTNPVATEQYGSVSTNLQRGNRQAATADVNTQGVLPGMVWQDRDVYLQGPIWAKIPHTDGHFHPSPLMGGFGLKHPPPQILIKNTPVPANPSTTFSAAKFASFITQYSTGQVSVEIEWELQKENSKRWNPEIQYTSNYNKSVNVDFTVDTNGVYSEPRPIGTRYLTRNL

SEQ ID NO: 315 - DNA, 2208 bp, Adeno-associated virus
  source 1..2208: mol_type = unassigned DNA
atggctgccgatggttatcttccagattggctcgaggacactctctctgaaggaataagacagtggtggaagctcaaacctggcccaccaccaccaaagcccgcagagcggcataaggacgacagcaggggtcttgtgcttcctgggtacaagtacctcggacccttcaacggactcgacaagggagagccggtcaacgaggcagacgccgcggccctcgagcacgacaaagcctacgaccggcagctcgacagcggagacaacccgtacctcaagtacaaccacgccgacgcggagtttcaggagcgccttaaagaagatacgtcttttgggggcaacctcggacgagcagtcttccaggcgaaaaagagggttcttgaacctctgggcctggttggggaacctgttaagacggctccgggaaaaaagaggccggtagagcactctcctgtggagccagactcctcctcgggaaccggaaaggcgggccagcagcctgcaagaaaaagattgaattttggtcagactggagacgcagactcagtacctgacccccagcctctcggacagccaccagcagccccctctggtctgggaactaatacgatggctacaggcagtggcgcaccaatggcagacaataacgagggcgccgacggagtgggtaattcctcgggaaatcggcattgcgattccacatggatgggcgacagagtcatcaccaccagcacccgaacctgggccctgcccacctacaacaaccacctctacagacaaatttccagccaatcaggagcctcgaacgacaatcactactttggctacagcaccccttgggggtattttgacttcaacagattccactgccacttttcaccacgtgactggcaaagactcatcaacaacaactggggattccgacccaagagactcaacttcaagctctttaacattcaagtcaaagaggtcacgcagaatgacggtacgacgacgattgccaataaccttaccagcacggttcaggtgtttactgactcggagtaccagctcccgtacgtcctcggctcggcgcatcaaggatgcctcccgccgttcccagcagacgtcttcatggtgccacagtatggatacctcaccctgagcaacgggagtcaggcagtaggacgctcttcattttactgcccggagtactttccttctcagatgctgcgtaccggaaacaactttaccttcagctacacttttgaggacgttcctttccacagcagctacgctcacagccagagtctggaccgtctcatgaatcctctcatcgaccagtacctgtattacttgagcacaacaaacactccaagtggaaccaccacgcagtcaaggcttcagttttctcaggccggagcgagtgacattcgggaccagtctaggaactggcttcctggaccctgttaccgccagcagcgagtatcaaagacatctgcggataacaacaacagtgaatactcgtggactggagctaccaagtaccacctcaatggcagagactctctggtgaatccgggcccggccatggcaagccacaaggacaatgaagaaaagttttttcctcagagcggggttctcatctttgggaagcaaggctcagagaaaacaaatgtggacattgaaaaggtcatgattacagacgaagaggaaatcaggacaaccaatcccgtggctacggagcagtatggttctgtatctaccaacctccagagaggcaacagacaagcagctaccgcagatgtcaacacacaaggcgttcttccaggcatggtctggcaggacagagatgtgtaccttcaggggcccatctgggcaaagattccacacacggacggacattttcacccctctcccctcatgggtggattcggacctaaacaccctcctccacagattctcatcaagaacaccccggtacctgcgaatccttcgaccaccttcagtgcggcaaagtttgcttccttcatcacacagtactccacgggacaggtcagcgtggagatcgagtgggagctgcagaaggaaaacagcaaacgctggaatcccgaaattcagtacacttccaactacaacaagtctgttaatgtggactttactgtggacactaatggcgtgtattcagagcctcgccccattggcaccagatacctgactcgtaatttgtaa

SEQ ID NO: 316 - protein, 735 aa, Adeno-associated virus
MAADGYLPDWLEDTLSEGIRQWWKLKPGPPPPKPAERHKDDSRGLVLPGYKYLGPFNGLDKGEPVNEADAAALEHDKAYDRQLDSGDNPYLKYNHADAEFQERLKEDTSFGGNLGRAVFQAKKRVLEPLGLVGEPVKTAPGKKRPVEHSPVEPDSSSGTGKAGQQPARKRLNFGQTGDADSVPDPQPLGQPPAAPSGLGTNTMATGSGAPMADNNEGADGVGNSSGNRHCDSTWMGDRVITTSTRTWALPTYNNHLYRQISSQSGASNDNHYFGYSTPWGYFDFNRFHCHFSPRDWQRLINNNWGFRPKRLNFKLFNIQVKEVTQNDGTTTIANNLTSTVQVFTDSEYQLPYVLGSAHQGCLPPFPADVFMVPQYGYLTLSNGSQAVGRSSFYCPEYFPSQMLRTGNNFTFSYTFEDVPFHSSYAHSQSLDRLMNPLIDQYLYYLSTTNTPSGTTTQSRLQFSQAGASDIRDQSRNWLPGPCYRQQRVSKTSADNNNSEYSWTGATKYHLNGRDSLVNPGPAMASHKDNEEKFFPQSGVLIFGKQGSEKTNVDIEKVMITDEEEIRTTNPVATEQYGSVSTNLQRGNRQAATADVNTQGVLPGMVWQDRDVYLQGPIWAKIPHTDGHFHPSPLMGGFGPKHPPPQILIKNTPVPANPSTTFSAAKFASFITQYSTGQVSVEIEWELQKENSKRWNPEIQYTSNYNKSVNVDFTVDTNGVYSEPRPIGTRYLTRNL

SEQ ID NO: 317 - DNA, 2205 bp, Adeno-associated virus
  source 1..2205: mol_type = unassigned DNA
atggctgccgatggttatcttccagattggctcgaggacactctctctgaaggaataagacagtggtggaagctcaaacctggcccaccaccaccaaagcccgcagagcggcataaggacgacagcaggggtcttgtgcttcctgggtacaagtacctcggacccttcaacggactcgacaagggagagccggtcaacgaggcagacgccgcggccctcgagcacgacaaggcctacgaccggcagctcgacagcggagacaacccgtacctcaagtacaaccacgccgacgcggagtttcaggagcgtcttaaagaagatacgtcttttgggggcaacctcggacgagcagtcttccaggcgaaaaagagggttcttgaacctctgggcctggttgaggaacctgttaagacggctccgggaaaaaagaggccggtagagcactctcctgcggagccagactcctcctcgggaaccggaaaagcgggccagcagcctgcaagaaaaagactgaatttcggtcagactggagacgcagactccgtacctgacccccagcctctcagacagccaccagcagcccccacaagtttgggatctactacaatggctacaggcagtggcgcaccaatggcagacaataacgagggtgccgatggagtgggtaattcctcaggaaattggcattgcgattcccaatggctgggcgacagagtcatcaccaccagcacccgaacctgggccctgcccacctacaacaaccacctttacaagcaaatctccagccaatcaggagcctcaaacgacaaccactactttggctacagcaccccctgggggtattttgacttcaacagattccactgccacttttcaccacgtgactggcaaagactcatcaacaacaactggggattccgacccaagagactcaacttcaagctctttaacattcaagtcaaagaggtcacgcagaatgacggtacgacgacgattgccaataaccttaccagcacggttcaggtgtttactgactcggagtaccagctcccgtacgtcctcggctcggcgcatcaaggatgcctcccgccgtttccagcggacgtcttcatggtcccacagtatggatacctcaccctgaacaacgggagtcaggcggtaggacgctcttccttttactgcctggagtactttccttctcagatgctgcgtactggaaacaactttcagttcagctacacttttgaagacgtgcctttccacagcagctacgctcacagccagagtttggatcggctgatgaatcctctgatcgaccagtacctgtattatctaaacagaacacaaacagctagtggaactcagcagtctcggctactgtttagccaagctggacccacaagcatgtctcttcaagctaaaaactggctgcctggaccgtgttatcgccagcagcgtttgtcaaagcaggcaaacgacaacaacaacagcaactttccctggactggagctaccaagtactacctcaatggcagagactctttggtgaacccgggcccggccatggccagccacaaggacgatgaagaaaagtttttccccatgcatggaaccctaatatttggtaaagaaggaacaaatgctaccaacgcggaattggaaaatgtcatgattacagatgaagaggaaatcaggaccaccaatcccgtggctacagagcagtacggatatgtgtcaaataatttgcaaaactcaaatactgctgcaagtactgaaactgtgaatcaccaaggagcattacctggtatggtgtggcaggatcgagacgtgtacctgcagggacccatttgggccaagattcctcacaccgatggacactttcatccttctccactgatgggaggttttggactcaaacacccgcctcctcagattatgatcaaaaacactcccgttccagccaatcctcccacaaacttcagttctgccaagtttgcttccttcatcacacagtattccacgggacaggtcagcgtggagatcgagtgggagctgcagaaggagaacagcaaacgctggaatcccgaaattcagtacacttccaactacaacaaatctgttaatgtggactttactgtggacactaatggtgtgtattcagagcctcgccccattggcaccagatacctgactcgtaatctgtaa

SEQ ID NO: 318 - protein, 734 aa, Adeno-associated virus
MAADGYLPDWLEDTLSEGIRQWWKLKPGPPPPKPAERHKDDSRGLVLPGYKYLGPFNGLDKGEPVNEADAAALEHDKAYDRQLDSGDNPYLKYNHADAEFQERLKEDTSFGGNLGRAVFQAKKRVLEPLGLVEEPVKTAPGKKRPVEHSPAEPDSSSGTGKAGQQPARKRLNFGQTGDADSVPDPQPLRQPPAAPTSLGSTTMATGSGAPMADNNEGADGVGNSSGNWHCDSQWLGDRVITTSTRTWALPTYNNHLYKQISSQSGASNDNHYFGYSTPWGYFDFNRFHCHFSPRDWQRLINNNWGFRPKRLNFKLFNIQVKEVTQNDGTTTIANNLTSTVQVFTDSEYQLPYVLGSAHQGCLPPFPADVFMVPQYGYLTLNNGSQAVGRSSFYCLEYFPSQMLRTGNNFQFSYTFEDVPFHSSYAHSQSLDRLMNPLIDQYLYYLNRTQTASGTQQSRLLFSQAGPTSMSLQAKNWLPGPCYRQQRLSKQANDNNNSNFPWTGATKYYLNGRDSLVNPGPAMASHKDDEEKFFPMHGTLIFGKEGTNATNAELENVMITDEEEIRTTNPVATEQYGYVSNNLQNSNTAASTETVNHQGALPGMVWQDRDVYLQGPIWAKIPHTDGHFHPSPLMGGFGLKHPPPQIMIKNTPVPANPPTNFSSAKFASFITQYSTGQVSVEIEWELQKENSKRWNPEIQYTSNYNKSVNVDFTVDTNGVYSEPRPIGTRYLTRNL

SEQ ID NO: 319 - DNA, 3160 bp, Adeno-associated virus
  source 1..3160: mol_type = unassigned DNA
acccttcactaaagggactagtcctgcaggtttaaacgaattcgcccttgctgcgtcaactggaccaatgagaactttcccttcaacgactgtgtcgacaagatggtgatttggtgggaggaggggaagatgaccgccaaggtcgtggagtcggccaaagccattctcggaggaagcaaggtgcgcgtggaccagaaatgcaagtcctcggcccagatagatccgactcccgtgatcgtcacctccaacaccaacatgtgcgccgtgattgacgggaactcaacgaccttcgaacaccagcagccgttgcaagaccggatgttcaaatttgaactcacccgccgtctggatcatgactttgggaaggtcaccaagcgggaagtcaaagactttttccggtgggcaaaggatcacgtggttgaggtggagcatgaattctacgtcaaaaagggtggagccaagaaaagacccgcccctagtgacgcagatataagtgagcccaaacgggtgcgcgagtcagttgcgcagccatcgacgtcagacgcggaagcttcgatcaactacgcggacaggtaccaaaacaaatgttctcgtcacgtgggcatgaatctgatgctgtttccctgcagacaatgcgagagaatgaatcaaaattcaaatatctgcttcactcacggacagaaagactgtttagagtgctttcccgtgtcagaatctcaacctgtttctgtcgtcaaaaaggcgtatcagaaactgtgctacattcatcatatcatgggaaaggtgccagacgcttgcactgcctgcgatctggtcaatgtggatttggatgactgcatctctgaacaataaatgatttaaatcaggtatggctgccgatggttatcttccagattggctcgaggacactctctctgaaggaataagacagtggtggaagctcaaacctggcccaccaccaccaaagcccgcagagcggcataaggacgacagcaggggtcttgtgcttcctgggtacaagtacctcggacccttcaacggactcgacaagggagagccggtcaacgaggcagacgccgcggccctcgagcacgacaaggcctacgaccggcagctcgacagcggagacaacccgtacctcaagtacaaccacgccgacgcggagtttcaggagcgtcttaaagaagatacgtcttttgggggcaacctcggacgagcagtcttccaggcgaaaaagagggttcttgaacctctgggcctggttgaggaacctgttaagacggctccgggaaaaaagaggccggtagagcactctcctgcggagccagactcctcctcgggaaccggaaaagcgggccagcagcctgcaagaaaaagactgaatttcggtcagactggagacgcagactccgtacctgacccccagcctctcagacagccaccagcagcccccacaagtttgggatctactacaatggctacaggcagtggcgcaccaatggcagacaataacgagggtgccgatggagtgggtaattcctcaggaaattggcattgcgattcccaatggctgggcgacagagtcatcaccaccagcacccgaacctgggccctgcccacctacaacaaccacctttacaagcaaatctccagccaatcaggagcctcaaacgacaaccactactttggctacagcaccccctgggggtattttgacttcaacagattccactgccacttttcaccacgtgactggcaaagactcatcaacaacaactggggattccgacccaagagactcaacttcaagctctttaacattcaagtcaaagaggtcacgcagaatgacggtacgacgacgattgccaataaccttaccagcacggttcaggtgtttactgactcggagtaccagctcccgtacgtcctcggctcggcgcatcaaggatgcctcccgccgtttccagcggacgtcttcatggtcccacagtatggatacctcaccctgaacaacgggagtcaggcggtaggacgctcttccttttactgcctggagtactttccttctcagatgctgcgtactggaaacaactttcagttcagctacacttttgaagacgtgcctttccacagcagctacgctcacagccagagtttggatcggctgatgaatcctctgatcgaccagtacctgtattatctaaacagaacacaaacagctagtggaactcagcagtctcggctactgtttagccaagctggacccacaagcatgtctcttcaagctaaaaactggctgcctggaccgtgttatcgccagcagcgtttgtcaaagcaggcaaacgacaacaacaacagcaactttccctggactggagctaccaagtactacctcaatggcagagactctttggtgaacccgggcccggccatggccagccacaaggacgatgaagaaaagtttttccccatgcatggaaccctaatatttggtaaagaaggaacaaatgctaccaacgcggaattggaaaatgtcatgattacagatgaagaggaaatcaggaccaccaatcccgtggctacagagcagtacggatatgtgtcaaataatttgcaaaactcaaatactgctgcaagtactgaaactgtgaatcaccaaggagcattacctggtatggtgtggcaggatcgagacgtgtacctgcagggacccatttgggccaagattcctcacaccgatggacactttcatccttctccactgatgggaggttttggactcaaacacccgcctcctcagattatgatcaaaaacactcccgttccagccaatcctcccacaaacttcagttctgccaagtttgcttccttcatcacacagtattccacgggacaggtcagcgtggagatcgagtgggagctgcagaaggagaacagcaaacgctggaatcccgaaattcagtacacttccaactacaacaaatctgttaatgtggactttactgtggacactaatggtgtgtattcagagcctcgccccattggcaccagatacctgactcgtaatctgtaattgcttgttaatcaataaaccgtttaattcgtttcagttgaactttggtctctgcgaagggcgaattcgcggccgctaaatcaatcg

SEQ ID NO: 320 - protein, 734 aa, Adeno-associated virus
MAADGYLPDWLEDTLSEGIRQWWKLKPGPPPPKPAERHKDDSRGLVLPGYKYLGPFNGLDKGEPVNEADAAALEHDKAYDRQLDSGDNPYLKYNHADAEFQERLKEDTSFGGNLGRAVFQAKKRVLEPLGLVEEPVKTAPGKKRPVEHSPAEPDSSSGTGKAGQQPARKRLNFGQTGDADSVPDPQPLGQPPAAPTSLGSTTMATGSGAPMADNNEGADGVGNSSGNWHCDSQWLGDRVITTSTRTWALPTYNNHLYKQISSQSGASNDNHYFGYSTPWGYFDFNRFHCRFSPRDWQRLINNNWGFRPKRLNFKLFNIQVKEVTQNDGTTTIANNLTSTVQVFTDSEYQLPYVLGSAHQGCLPPFPADVFMVPQYGYLTLNNGSQAVGRSSFYCLEYFPSQMLRTGNNFQFSYTFEDVPFHSSYAHSQGLDRLMNPLIDQYLYYLNRTQTASGTQQSRLLFSQAGPTSMSLQAKNWLPGPCYRQQRLSKQANDNNNSNFPWTGATKYHLNGGDSLVNPGPAMASHKDDEEKFFPMHGTLIFGKEGTNATNAELENVMITDEEEIRTTNPVATEQYGYVSNNLQNSNTAASTETVNHQGALPGMVWQDRDVYLRGPIWAKIPHADGHFHPSPLMGGFGLKHPPPQIMIKNTPVPANPPTNFSSAKFASFITQYSTGQVSVEIEWELQKENSKRWNPEIQYTSNYNKSVNVDFTVDTNGVYSEPRPIGTRYLTRNL

SEQ ID NO: 321 - DNA, 3157 bp, Adeno-associated virus
  source 1..3157: mol_type = unassigned DNA
ctcactaagggactagtcctgcaggtttaaacgaattcgcccttgctgcgtcaactggaccaatgagaactttcccttcaacgactgtgtcgacaagatggtgatttggtgggaggaggggaagatgaccgccaaggtcgtggagtcggccaaagccactctcggaggaagcaaggtgcgcgtggaccagaaacgcaagtcctcggcccagatagatccgactcccgtgatcgtcacctccaacaccaacatgtgcgccgtgattgacgggaactcaacgaccttcgaacaccagcagccgttgcaagaccgaatgttcaaatttgaactcacccgccgtctggatcatgacttcgggaaggtcaccaagcaggaagtcaaagactttttccggtgggcaaaggatcacgtggttgaggtggagcatgaattctacgtcaaaaagggtggagccaagaaaagacccgcccctagtgacgcagatataagtgagcccaaacgggtgcgcgagtcagttgcgcagccatcgacgtcagacgcggaagcttcgatcaactacgcggacaggtaccaaaacaaatgttctcgtcacgtgggcatgaatctgatgctgtttccctgcagacaatgcgagagaatgaatcaaaattcaaatatctgcttcactcacggacagaaagactgtttagagtgctttcccgtgtcagaatctcaacctgtttctgtcgtcaaaaaggcgtatcagaaactgtgctacattcatcatatcatgggaaaggtgccagacgcttgcactgcctgcgatctggtcaatgtggatttggatgactgcatctctgaacaataaatgatttaaatcaggtatggctgccgatggttatcttccagattggctcgaggacactctctctgaaggaataagacagtggtggaagctcaaacctggcccaccaccaccaaagcccgcagagcggcataaggacgacagcaggggtcttgtgcttcctgggtacaagtacctcggacccttcaacggactcgacaagggagagccggtcaacgaggcagacgccgcggctctcgagcacgacaaggcctacgaccggcagctcgacagcggagacaacccgtacctcaagtacaaccacgccgacgcggagtttcaggagcgtcttaaagaagatacgtcttttgggggcaacctcggacgagcagtcttccaggcgaaaaagagggttcttgaacctctgggcctggttgaggaacctgttaagacggctccgggaaaaaagaggccggtagagcactctcctgcggagccagactcctcctcgggaaccggaaaagcgggccagcagcctgcaagaaaaagactgaatttcggtcagactggagacgcagactccgtacctgacccccagcctctcggacagccaccagcagcccccacaagtttgggatctactacaatggctacaggcagtggcgcaccaatggcagacaataacgagggtgccgatggagtgggtaattcctcaggaaattggcattgcgattcccaatggctgggcgacagagtcatcaccaccagcacccgaacctgggccctgcccacctacaacaaccacctttacaagcaaatctccagccaatcaggagcctcaaacgacaaccactactttggctacagcaccccctgggggtattttgacttcaacagattccactgccgcttttcaccacgtgactggcaaagactcatcaacaacaactggggattccgacccaagagactcaacttcaagctctttaacattcaagtcaaagaggtcacgcagaatgacggtacgacgacgattgccaataaccttaccagcacggttcaggtgtttactgactcggagtaccagctcccgtacgtcctcggctcggcgcatcaaggatgcctcccgccgtttccagcggacgtcttcatggtcccacagtatggatacctcaccctgaacaacgggagtcaggcggtaggacgctcttccttttactgcctggagtactttccttctcagatgctgcgtactggaaacaactttcagttcagctacacttttgaagacgtgcctttccacagcagctacgctcacagccagggtttggatcggctgatgaatcctctgatcgaccagtacctgtattatctaaacagaacacaaacagctagtggaactcagcagtctcggctactgtttagccaagctggacccacaagcatgtctcttcaagctaaaaactggctgcctggaccgtgttatcgccagcagcgtttgtcaaagcaggcaaacgacaacaacaacagcaactttccctggactggagctaccaagtaccacctcaatggcggagactctttggtgaacccgggcccggccatggccagccacaaggacgatgaagaaaagtttttccccatgcatggaaccctaatatttggtaaagaaggaacaaatgctaccaacgcggaattggaaaatgtcatgattacagatgaagaggaaatcaggaccaccaatcccgtggctacagagcagtacggatatgtgtcaaataatttgcaaaactcaaatactgctgcaagtactgaaactgtgaatcaccaaggagcattacctggtatggtgtggcaggatcgagacgtgtacctgcggggacccatttgggccaagattcctcacgccgatggacactttcatccttctccactgatgggaggttttggactcaaacacccgcctcctcagattatgatcaaaaacactcccgttccagccaatcctcccacaaacttcagttctgccaagtttgcttccttcatcacacagtattccacgggacaggtcagcgtggagatcgagtgggagctgcagaaggagaacagcaaacgctggaatcccgaaattcagtacacttccaactacaacaaatctgttaatgtggactttactgtggacactaatggtgtgtattcagagcctcgccccattggcaccagatacctgactcgtaatctgtaattgcttgttaatcaataaaccgtttaattcgtttcagttgaactttggtctctgcgaagggcgaattcgcggccgctaaattcaattcg

SEQ ID NO: 322 - protein, 734 aa, Adeno-associated virus
MAADGYLPDWLEDTLSEGIRQWWKLKPGPPPPKPAERHKDDSRGLVLPGYKYLGPFNGLDKGEPVNEADAAALEHDKAYDRQLDSGDNPYLKYNHADAEFQERLKEDTSFGGNLGRAVFQAKKRVLEPLGLVEEPVKTAPGKKRPVEHSPAEPDSSSGTGKAGQQPARKRLNFGQTGDADSVPDPQPLGQPPAAPTSLGSTTMATGSGAPMADNNEGADGVGNSSGNWHCDSQWLGDRVITTSTRTWALPTYNNHLYKQISSQSGASNDNHYFGYSTPWGYFDFNRFHCHFSPRDWQRLINNNWGFRPKRLNFKLFNIQVKEVTQNDGTTTIANNLTSTVQVFTDSEYQLPYVLGSAHQGCLPPFPADVFMVPQYGYLTLNNGSQAVGRSSFYCLECFPSQMLRTGNNFQFSYTFEDVPFHSSYAHSQSLDRLMNPLIDQYLYYLNRTQTASGTQQSRLLFSQAGPTSMSLQAKNWLPGPCYRQQRLSKQANDNNNSNFPWTGATKYHLNGRDSLVNPGPAMASHKDDEEKFFPMHGTLIFGKEGTNATNAELENVMITDEEEIRTTNPVATEQYGYVSNNLQNSNTAASTETVNHQGALPGMVWQDRDVYLQGPIWAKIPHTDGHFHPSPLMGGFGLKHPPPQIMIKNTPVPANPPTNFSSAKFASFITQYSTGQVSVEIEWELQKENSKRWNPEIQYTSNYNKSVNVDFTVDTNGVYSEPRPIGTRYLTRNL

SEQ ID NO: 323 - DNA, 2208 bp, Adeno-associated virus
  source 1..2208: mol_type = unassigned DNA
atggctgccgatggttatcttccagattggctcgaggacactctctctgaaggaataagacagtggtggaagctcaaacctggcccaccaccaccaaagcccgcagagcggcataaggacgacagcaggggtcttgtgcttcctggatacaagtacctcggacccttcaacggactcgacaagggagagccggtcaacgaggcagacgccgcggccctcgagcacgacaaggcctacgaccggcagctcgacagcggagacaacccgtacctcaagtacaaccacgccgacgcggagtttcaggagcgccttaaagaagatacgtcttttgggggcaacctcggacgagcagtcttccaggcgaaaaagagggttcttgaacctctgggcctggttgaggaacctgttaagacggctccgggaaaaaagaggccggtagagcactctcctgtggagccagactcctcctcgggaaccggaaaagcgggcaaccagcctgcaagaaaaagattgaatttcggtcagactggagacgcagactccgtacctgacccccagcctctcggacagccaccagcatccccctctggtctgggaactaatacgatggctacaggcagtggcgcaccaatggcagacaataacgagggcgccgacggagtgggtaattcctcgggaaattggcattgcgattccacatggatgggcgacagagtcgtcaccaccagcacccgcacctgggccctgcccacctacaacaaccacctctacaagcagatttccagccaatcaggagccagcaacgacaaccactactttggctacagcaccccttgggggtattttgacttcaacagattccactgccacttttcgccacgcgactggcagagactcatcaacaacaactggggattccggcccaaaagactcaacttcaagctgtttaacattcaagtcaaggaggtcacgcagaatgacggtacgacgacgattgccaataaccttaccagcacggttcaggtgtttactgacttggagtaccagctcccgtacgtcctcggctcggcgcatcaaggatgcctcccgccgttcccagcagacgtcttcatggtgccacagtatggatacctcaccctgaacaacgggagtcaggcggtaggacgctcttccttttactgcctggagtactttccttctcagatgcttcgcaccggaaacaactttaccttcagctacacttttgaagacgttcctttccacagcagctacgctcacagtcaaagtctggaccgtctcatgaatcctctcatcgaccagtacctgtattacttgagcagaacaaacactccaagcggaaccactacgcagtccaggcttcagttttctcaggccggagcgagtgacattcgggaccagtctaggaactggcttcctggaccctgttaccgccagcagcgagtatcaaagacagctgcggataacaacaacagtgaatactcgtggactggagctaccaagtaccacctcaatggcagagactctctggtgaatccgggcccggccatggccagccacaaggacgatgaagaaaagttttttcctcaaagcggggttctcatctttgggaagcaaggctcagagaaaacaaatgtggacattgaaaaggtcatgattacagacgaagaggaaatcaggaccaccaatcccgtggctacggagcagtatggttctgtatctaccaacctccagagcggcaacacacaagcagctacctcagatgtcaacacacaaggcgttcttccaggcatggtctggcaggacagagacgtgtacctgcaggggcccatctgggcaaaaattccacacacggacggacattttcacccctctcccctcatgggcggatttggacttaaacaccctcctccacagattctcattaagaataccccggtacctgcgaatccttcgaccaccttcagcgcggcaaagtttgcttccttcatcacacagtattccacggggcaggtcagcgtggagatcgagtgggagctgcagaaggagaacagcaaacgctggaatcccgaaattcagtacacttccaactacaacaaatctgttaatgtggactttactgtggacactaatggggtgtattcagagcctcgccctattggcaccagatacctgactcgtaatctgtaa

SEQ ID NO: 324 - DNA, 3159 bp, Adeno-associated virus
  source 1..3159: mol_type = unassigned DNA
gattgatttagcggccgcgaattcgcccttgctgcgtcaactggaccaatgagaactttcccttcaacgattgcgtcgacaagatggtgatctggtgggaggagggaaagatgaccgccaaggtcgtggagtcggccaaagccattctcggaggaagcaaggtgcgtgtggaccaaaagtgcaagtcttcggcccagatcgacccgactcccgtgatcgtcacctccaacaccaacatgtgcgccgtgattgatggaaactcaacgaccttcgagcaccagcagccgttgcaagaccggatgttcaaatttgaacttacccgccgtctggatcatgactttggaaaggtcaccaagcaggaagtgaaagactttttccggtgggcaaaggatcacgtggttgaggtggagcatgagttctacgtcaaaaagggtggagccaaaaaaagacccgcccccagtgacgcagatataagtgagcccaaacgggcgcgcgagtcagttgcgcagccatcgacgtcagacgcggaagcttcgatcaactacgcggacaggtaccaaaacaaatgttctcgtcacgtgggcatgaatctgatgctgtttccctgcagacaatgcgagagaatgaatcagaattcaaatatctgcttcactcacggacagaaagactgtccatagtgctttcccgtgtcagaatctcaacccgtttctgtcgtcaaaaaggcgtatcagaaactgtgctacattcatcacatcatgggaaaggtgccagacgcttgcactgcttgcgacctggtcaatgtggatttggatgactgcatctctgaacaataaatgatttaaatcaggtatggctgccgatggttatcttccagattggctcgaggacactctctctgaaggaataagacagtggtggaagctcaaacctggcccaccaccaccaaagcccgcagagcggcataaggacgacagcaggggtcttgtgcttcctggatacaagtacctcggacccttcaacggactcgacaagggagagccggtcaacgaggcagacgccgcggccctcgagcacgacaaggcctacgaccggcagctcgacagcggagacaacccgtacctcaagtacaaccacgccgacgcggagtttcaggagcgccttaaagaagatacgtcttttgggggcaacctcggacgagcagtcttccaggcgaaaaagagggttcttgaacctctgggcctggttgaggaacctgttaagacggctccgggaaaaaagaggccggtagagcactctcctgtggagccagactcctcctcgggaaccggaaaagcgggcaaccagcctgcaagaaaaagattgaatttcggtcagactggagacgcagactccgtacctgacccccagcctctcggacagccaccagcatccccctctggtctgggaactaatacgatggctacaggcagtggcgcaccaatggcagacaataacgagggcgccgacggagtgggtaattcctcgggaaattggcattgcgattccacatggatgggcgacagagtcgtcaccaccagcacccgcacctgggccctgcccacctacaacaaccacctctacaagcagatttccagccaatcaggagccagcaacgacaaccactactttggctacagcaccccttgggggtattttgacttcaacagattccactgccacttttcgccacgcgactggcagagactcatcaacaacaactggggattccggcccaaaagactcaacttcaagctgtttaacattcaagtcaaggaggtcacgcagaatgacggtacgacgacgattgccaataaccttaccagcacggttcaggtgtttactgacttggagtaccagctcccgtacgtcctcggctcggcgcatcaaggatgcctcccgccgttcccagcagacgtcttcatggtgccacagtatggatacctcaccctgaacaacgggagtcaggcggtaggacgctcttccttttactgcctggagtactttccttctcagatgcttcgcaccggaaacaactttaccttcagctacacttttgaagacgttcctttccacagcagctacgctcacagtcaaagtctggaccgtctcatgaatcctctcatcgaccagtacctgtattacttgagcagaacaaacactccaagcggaaccactacgcagtccaggcttcagttttctcaggccggagcgagtgacattcgggaccagtctaggaactggcttcctggaccctgttaccgccagcagcgagtatcaaagacagctgcggataacaacaacagtgaatactcgtggactggagctaccaagtaccacctcaatggcagagactctctggtgaatccgggcccggccatggccagccacaaggacgatgaagaaaagttttttcctcaaagcggggttctcatctttgggaagcaaggctcagagaaaacaaatgtggacattgaaaaggtcatgattacagacgaagaggaaatcaggaccaccaatcccgtggctacggagcagtatggttctgtatctaccaacctccagagcggcaacacacaagcagctacctcagatgtcaacacacaaggcgttcttccaggcatggtctggcaggacagagacgtgtacctgcaggggcccatctgggcaaaaattccacacacggacggacattttcacccctctcccctcatgggcggatttggacttaaacaccctcctccacagattctcattaagaataccccggtacctgcgaatccttcgaccaccttcagcgcggcaaagtttgcttccttcatcacacagtattccacggggcaggtcagcgtggagatcgagtgggagctgcagaaggagaacagcaaacgctggaatcccgaaattcagtacacttccaactacaacaaatctgttaatgtggactttactgtggacactaatggggtgtattcagagcctcgccctattggcaccagatacctgactcgtaatctgtaattgcttgttaatcaataaaccgtttaattcgtttcagttgaactttggtctctgcgaagggcgaattcgtttaaacctgcaggactagtccctttagtgagg

SEQ ID NO: 325 - protein, 735 aa, Adeno-associated virus
MAADGYLPDWLEDTLSEGIRQWWKLKPGPPPPKPAERHKDDSRGLVLPGYKYLGPFNGLDKGEPVNEADAAALEHDKAYDRQLDSGDNPYLKYNHADAEFQERLKEDTSFGGNLGRAVFQAKKRVLEPLGLVEEPVKTAPGKKRPVEHSPVEPDSSSGTGKAGNQPARKRLNFGQTGDADSVPDPQPLGQPPASPSGLGTNTMATGSGAPMADNNEGADGVGNSSGNWHCDSTWMGDRVVTTSTRTWALPTYNNHLYKQISSQSGASNDNHYFGYSTPWGYFDFNRFHCHFSPRDWQRLINNNWGFRPKRLNFKLFNIQVKEVTQNDGTTTIANNLTSTVQVFTDLEYQLPYVLGSAHQGCLPPFPADVFMVPQYGYLTLNNGSQAVGRSSFYCLEYFPSQMLRTGNNFTFSYTFEDVPFHSSYAHSQSLDRLMNPLIDQYLYYLSRTNTPSGTTTQSRLQFSQAGASDIRDQSRNWLPGPCYRQQRVSKTAADNNNSEYSWTGATKYHLNGRDSLVNPGPAMASHKDDEEKFFPQSGVLIFGKQGSEKTNVDIEKVMITDEEEIRTTNPVATEQYGSVSTNLQSGNTQAATSDVNTQGVLPGMVWQDRDVYLQGPIWAKIPHTDGHFHPSPLMGGFGLKHPPPQILIKNTPVPANPSTTFSAAKFASFITQYSTGQVSVEIEWELQKENSKRWNPEIQYTSNYNKSVNVDFTVDTNGVYSEPRPIGTRYLTRNL

SEQ ID NO: 326 - DNA, 2205 bp, Adeno-associated virus
  source 1..2205: mol_type = unassigned DNA
atggctgccgatggttatcttccagattggctcgaggacactctctctgaaggaataagacagtggtggaagctcaaacctggcccaccaccaaagcccgcagagcggcataaggacgacagcaggggtcttgtgcttcctggatacaagtacctcggacccttcaacggactcgacaagggagagccggtcaacgaggcagacgccgcggccctcgagcacgacaaggcctacgaccggcagctcgacagcggagacaacccgtacctcaagtacaaccacgccgacgcggagtttcaggagcgccttaaagaagatacgtcttttgggggcaacctcggacgagcagtcttccaggcgaaaaagagggttcttgaacctctgggcctggttgaggaacctgttaagacggctccgggaaaaaagaggcccgtagagcactctcctgtggagccagactcctcctcgggaaccggaaaagcgggcaaccagcctgcaagaaaaagattgaatttcggtcagactggagacgcagactccgtacctgacccccagcctctcggacagccaccagcagccccctctggtctgggaactaatacgatggctacaggcagtggcgcaccaatggcagacaataacgagggcgccgacggagtgggtaattcctcgggagattggcattgcgattccacatggatgggcgacagagtcatcaccaccagcacccgcacctgggccctgcccacctacaacaaccacctctacaagcagatttccagccaatcaggagccagcaatgacaaccactactttggctacagcaccccttgggggtattttgacttcaacagattccactgccacttttcgccacgcgactggcagagactcatcaacaacaactggggattccggcccaaaagactcaacctcaagctgtttaacattcaagtcaaggaggtcacgcagaatgacggtacgacgacgattgccaataaccttaccagcacggttcaggtgtttactgacttggagtaccagctcccgtacgtcctcggctcggcgcatcaaggatgcctcccgccgttcccagcagacgtcttcatggtgccacagtatggatacctcaccctgaacaacgggagtcaggcggtaggacgctcttccttttactgcctggagtactttccttctcagatgcttcgtaccggaaacaactttaccttcagctacacttttgaagacgttcctttccacagcagctacgctcacagtcaaagtctggaccgtctcatgaatcctctcatcgaccagtacctgtattacttgagcagaacaaacactccaagcggaaccactacgcagtccaggcttcagttttctcaggccggagcgagtgacattcgggaccagtctaggaactggcttcctggaccctgttaccgccagcagcgagtatcaaagacagctgcggataacaacaacggtgaatactcgtggactggagctaccaagtaccacctcaatggcagagactctctggtgaatccgggcccggccatggccagccacaaggacgatgaagaaaagttttttcctcaaagcggggttctcatctttgggaagcaaggctcagagaaaacaaatgtggacattgaaaaggtcatgattacagacgaagaggaaatcaggaccaccaatcccgtggctacggagcagtatggttctgtatctaccaacctccagagcggcaacacacgagcagctacctcagatgtcaacacacaaggcgttcttccaggcatggtctggcaggacagagacgtgtacctgcaggggcccatctgggcaaaaattccacacacggacggacattttcacccctctcccctcatgggcggatttggacttaaacaccctcctccacagattctcattaagaataccccggtacctgcgaatccttcgaccaccttcagcgcggcaaagtttgcttccttcatcacacagtattccacggggcaggtcagcgtggagatcgagtgggagctgcagaaggagaacagcaaacgctggaatcccgaaattcagtacacttccaactacaacaaatctgttaatgtggactttactgtggacactaatggggtgtattcagagcctcgccctattggcaccagatacctgactcgtaatctgtaa

SEQ ID NO: 327 - DNA, 3156 bp, Adeno-associated virus
  source 1..3156: mol_type = unassigned DNA
cgattgaatttagcggccgcgaattcgcccttgctgcgtcaacggaccaatgagaactttcccttcaacgattgcgtcgacaagatggtgatctggtgggaggagggaaagatgaccgccaaggtcgtggagtcggccaaagccattctcggaggaagcaaggtgcgtgtggaccaaaagtgcaagtcttcggcccagatcgacccgactcccgtgatcgtcacctccaacaccaacatgtgcgccgtgattgatggaaactcaacgaccttcgagcaccagcagccgttgcaagaccggatgttcaaatttgaacttacccgccgtctggatcatgactttggaaaggtcaccaagcaggaagtgaaagactttttccggtgggcaaaggatcacgtggttgaggtggagcatgagttctacgtcaaaaagggtggagccaaaaaaagacccgcccccagtgacgcagatataagtgagcccaaacgggcgcgcgagtcagttgcgcagccatcgacgtcagacgcggaagcttcgatcaactacgcggacaggtaccaaaacaaatgttctcgtcacgtgggcatgaatctgatgctgtttccctgcagacaatgcgagcgaatgaatcagaattcaaatatctgcttcactcacggacagaaagactgtttagagtgctttcccgtgtcagaatctcaacccgtttctgtcgtcaaaaaggcgtatcagaaactgtgctacattcatcacatcatgggaaaggtgccagacgcttgcactgcttgcgacctggtcaatgtggatttggatgactgcatctctgaacaataaatgatttaaatcaggtatggctgccgatggttatcttccagattggctcgaggacactctctctgaaggaataagacagtggtggaagctcaaacctggcccaccaccaaagcccgcagagcggcataaggacgacagcaggggtcttgtgcttcctggatacaagtacctcggacccttcaacggactcgacaagggagagccggtcaacgaggcagacgccgcggccctcgagcacgacaaggcctacgaccggcagctcgacagcggagacaacccgtacctcaagtacaaccacgccgacgcggagtttcaggagcgccttaaagaagatacgtcttttgggggcaacctcggacgagcagtcttccaggcgaaaaagagggttcttgaacctctgggcctggttgaggaacctgttaagacggctccgggaaaaaagaggcccgtagagcactctcctgtggagccagactcctcctcgggaaccggaaaagcgggcaaccagcctgcaagaaaaagattgaatttcggtcagactggagacgcagactccgtacctgacccccagcctctcggacagccaccagcagccccctctggtctgggaactaatacgatggctacaggcagtggcgcaccaatggcagacaataacgagggcgccgacggagtgggtaattcctcgggagattggcattgcgattccacatggatgggcgacagagtcatcaccaccagcacccgcacctgggccctgcccacctacaacaaccacctctacaagcagatttccagccaatcaggagccagcaatgacaaccactactttggctacagcaccccttgggggtattttgacttcaacagattccactgccacttttcgccacgcgactggcagagactcatcaacaacaactggggattccggcccaaaagactcaacctcaagctgtttaacattcaagtcaaggaggtcacgcagaatgacggtacgacgacgattgccaataaccttaccagcacggttcaggtgtttactgacttggagtaccagctcccgtacgtcctcggctcggcgcatcaaggatgcctcccgccgttcccagcagacgtcttcatggtgccacagtatggatacctcaccctgaacaacgggagtcaggcggtaggacgctcttccttttactgcctggagtactttccttctcagatgcttcgtaccggaaacaactttaccttcagctacacttttgaagacgttcctttccacagcagctacgctcacagtcaaagtctggaccgtctcatgaatcctctcatcgaccagtacctgtattacttgagcagaacaaacactccaagcggaaccactacgcagtccaggcttcagttttctcaggccggagcgagtgacattcgggaccagtctaggaactggcttcctggaccctgttaccgccagcagcgagtatcaaagacagctgcggataacaacaacggtgaatactcgtggactggagctaccaagtaccacctcaatggcagagactctctggtgaatccgggcccggccatggccagccacaaggacgatgaagaaaagttttttcctcaaagcggggttctcatctttgggaagcaaggctcagagaaaacaaatgtggacattgaaaaggtcatgattacagacgaagaggaaatcaggaccaccaatcccgtggctacggagcagtatggttctgtatctaccaacctccagagcggcaacacacgagcagctacctcagatgtcaacacacaaggcgttcttccaggcatggtctggcaggacagagacgtgtacctgcaggggcccatctgggcaaaaattccacacacggacggacattttcacccctctcccctcatgggcggatttggacttaaacaccctcctccacagattctcattaagaataccccggtacctgcgaatccttcgaccaccttcagcgcggcaaagtttgcttccttcatcacacagtattccacggggcaggtcagcgtggagatcgagtgggagctgcagaaggagaacagcaaacgctggaatcccgaaattcagtacacttccaactacaacaaatctgttaatgtggactttactgtggacactaatggggtgtattcagagcctcgccctattggcaccagatacctgactcgtaatctgtaattgcttgttaatcaataaaccgtttaattcgtttcagttgaactttggtctctgcgaagggcgaattcgtttaaacctgcaggactagtccctttagtgag

SEQ ID NO: 328 - protein, 734 aa, Adeno-associated virus
MAADGYLPDWLEDTLSEGIRQWWKLKPGPPPKPAERHKDDSRGLVLPGYKYLGPFNGLDKGEPVNEADAAALEHDKAYDRQLDSGDNPYLKYNHADAEFQERLKEDTSFGGNLGRAVFQAKKRVLEPLGLVEEPVKTAPGKKRPVEHSPVEPDSSSGTGKAGNQPARKRLNFGQTGDADSVPDPQPLGQPPAAPSGLGTNTMATGSGAPMADNNEGADGVGNSSGDWHCDSTWMGDRVITTSTRTWALPTYNNHLYKQISSQSGASNDNHYFGYSTPWGYFDFNRFHCHFSPRDWQRLINNNWGFRPKRLNLKLFNIQVKEVTQNDGTTTIANNLTSTVQVFTDLEYQLPYVLGSAHQGCLPPFPADVFMVPQYGYLTLNNGSQAVGRSSFYCLEYFPSQMLRTGNNFTFSYTFEDVPFHSSYAHSQSLDRLMNPLIDQYLYYLSRTNTPSGTTTQSRLQFSQAGASDIRDQSRNWLPGPCYRQQRVSKTAADNNNGEYSWTGATKYHLNGRDSLVNPGPAMASHKDDEEKFFPQSGVLIFGKQGSEKTNVDIEKVMITDEEEIRTTNPVATEQYGSVSTNLQSGNTRAATSDVNTQGVLPGMVWQDRDVYLQGPIWAKIPHTDGHFHPSPLMGGFGLKHPPPQILIKNTPVPANPSTTFSAAKFASFITQYSTGQVSVEIEWELQKENSKRWNPEIQYTSNYNKSVNVDFTVDTNGVYSEPRPIGTRYLTRNL

SEQ ID NO: 329 - DNA, 2208 bp, Adeno-associated virus
  source 1..2208: mol_type = unassigned DNA
atggctgccgatggttatcttccagattggctcgaggacactctctctgaaggaataagacagtggtggaagctcaaacctggcccaccaccaccaaagcccgcagagcggcataaggacgacagcaggggtcttgtgcttcctgggtacaagtacctcggacccttcaacggactcgacaagggagagccggtcaacgaggcagacgccgcggccctcgagcacgacaaggcctacgaccggcagctcgacagcggagacaacccgtacctcaagtacgaccacgccgacgcggagtttcaggagcgccttaaagaagatacgtcttttgggggcaacctcggacgagcagtcttccaggcaaaaaagagggttcttgaacctctgggcctggttgaggagcctgttaagacggctccgggaaaaaagaggccggtagagcactctcctgtggagccagactcctcctcgggaaccggaaaagcgggcaaccagcctgcaagaaagagattgaatttcggtcagactggagacgcagactccgtacctgacccccagcctctcggacagccaccagcagccccctctggtctgggaactaatacgatggctacaggcagtggcgcaccaatggcagacaataacgatggcgccgacggagtgggtaattcctcgggaaattggcattgcgattccacatggatgggcgacagagtcatcaccaccagcacccgaacctgggctctgcccacctacaacaaccatctgtacaagcagatttccagccaatcaggagccagcaacgacaaccactactttggctacagcaccccttgggggtattttgacttcaacagattccactgccacttttcaccacgtgactggcaaagactcatcaacaacaactggggattccggcccaagagactcaacttcaagctctttaacattcaagtcagagaggtcacgcagaatgatggtacgacgacgattgccaataaccttaccagcacggttcaggtgtttactgactcggagtaccagctcccgtacgtcctcggctcggcgcatcaaggatgcctcccgccgttcccagcagacgtcttcatggtgccacagtatggatacctcaccctgaacaacgggagtcaggcagtaggacgctcttcattttactgcctggagtacttcccttctcagatgctgcgtaccggaaacaactttaccttcagctacacctttgaggatgttcctttccacagcagctacgctcacagccagagtttggaccgtctcatgaatcctctcatcgaccagtacctgtattacttgagcagaacaaacactccaagcggaaccaccacgcagtccaggcttcagttttctcaggccggagcgagtgacattcgggatcagtctaggaactggcttcctggaccctgttaccgccagcagcgagtatcaaagacatctgcggacaacaacaacagtgaatactcgtggattggagctaccaagtaccacctcaatggcagagactctctggtgaatccgggcccggcaatggccagccacaaggacgatgaagaaaagttttttcctcagagcggggttctcatctttggaaaacaaggatcagagaaaacaaatgtggacattgaaaaggtcatgattacagacgaagaggaaatcagaaccaccaatcccgtggccacggagcagtatggttctgtatctaccaacctccagagcggcaacacacaagcatctactgcagatgtcaacacacaaggcgttcttccaggcatggtctggcaggacagagacgtgtacctgcaggggcctatctgggcaaagattccgcacacggacggacattttcacccctctcccctcatgggcggattcggacttaaacaccctcctccacagattctcatcaaaaacaccccggtacctgcgaatccttcgaccaccttcagtgcggcaaagtttgcttccttcatcacacagtattccacggggcgggtcagcgtggagatcgagtgggagctacagaaggagaacagcaaacgctggaatcccgagatccagtacacttccaactacaacaaatctgttaatgtggactttactgtggacactaatggtgtgtattcagagcctcgccccattggcaccagatacctgactcgtaatctgtaa

SEQ ID NO: 330 - protein, 735 aa, Adeno-associated virus
MAADGYLPDWLEDTLSEGIRQWWKLKPGPPPPKPAERHKDDSRGLVLPGYKYLGPFNGLDKGEPVNEADAAALEHDKAYDRQLDSGDNPYLKYDHADAEFQERLKEDTSFGGNLGRAVFQAKKRVLEPLGLVEEPVKTAPGKKRPVEHSPVEPDSSSGTGKAGNQPARKRLNFGQTGDADSVPDPQPLGQPPAAPSGLGTNTMATGSGAPMADNNDGADGVGNSSGNWHCDSTWMGDRVITTSTRTWALPTYNNHLYKQISSQSGASNDNHYFGYSTPWGYFDFNRFHCHFSPRDWQRLINNNWGFRPKRLNFKLFNIQVREVTQNDGTTTIANNLTSTVQVFTDSEYQLPYVLGSAHQGCLPPFPADVFMVPQYGYLTLNNGSQAVGRSSFYCLEYFPSQMLRTGNNFTFSYTFEDVPFHSSYAHSQSLDRLMNPLIDQYLYYLSRTNTPSGTTTQSRLQFSQAGASDIRDQSRNWLPGPCYRQQRVSKTSADNNNSEYSWIGATKYHLNGRDSLVNPGPAMASHKDDEEKFFPQSGVLIFGKQGSEKTNVDIEKVMITDEEEIRTTNPVATEQYGSVSTNLQSGNTQASTADVNTQGVLPGMVWQDRDVYLQGPIWAKIPHTDGHFHPSPLMGGFGLKHPPPQILIKNTPVPANPSTTFSAAKFASFITQYSTGRVSVEIEWELQKENSKRWNPEIQYTSNYNKSVNVDFTVDTNGVYSEPRPIGTRYLTRNL

SEQ ID NO: 331 - DNA, 2217 bp, Adeno-associated virus
  source 1..2217: mol_type = unassigned DNA
atggctgccgatggttatcttccagattggctcgaggacaacctctctgagggcattcgcgagtggtgggacttgaaacctggagccccgaaacccaaagccaaccagcaaaagcaggacgacggccggggtctggtgcttcctggctacaagtacctcggacccttcaacggactcgacaagggggagcccgtcaacgcggcggacgcagcggccctcgagcacgacaaggcctacgaccagcagctcaaagcgggtgacaatccgtacctgcggtataaccacgccgacgccgagtttcaggagcgtctgcaagaagatacgtcttttgggggcaacctcgggcgagcagtcttccaggccaagaagcgggttctcgaacctctcggtctggttgaggaaggcgctaagacggctcctggaaagaagagaccggtagagccatcaccccagcgttctccagactcctctacgggcatcggcaagacaggccagcagcccgcgaaaaagagactcaactttgggcagactggcgactcagagtcagtgcccgaccctcaaccaatcggagaaccccccgcaggcccctctggtctgggatctggtacaatggctgcaggcggtggcgctccaatggcagacaataacgaaggcgccgacggagtgggtagttcctcaggaaattggcattgcgattccgcatggctgggcgacagagtcatcaccaccagcacccgaccctgggccctccccacctacaacaaccacctctacaagcaaatctccaacgggacatcgggaggaagcaccaacgacaacacctacttcggctacagcaccccctgggggtattttgactttaacagattccactgccacttctcaccacgtgactggcagcgactcatcaacaacaactggggattccggcccaagagactcaacttcaagctcttcaacatccaggtcaaggaggtcacgcagaatgaaggcaccaagaccatcgccaataaccttaccagcacgattcaggtctttacggactcggaataccagctcccgtacgtcctcggctctgcgcaccagggctgcccgcctccgttcccggcggacgtcttcatgattcctcagtacgggtacctgactctgaacaacggcagtcaggccgtgggccgttcctccttctactgcctggagtactttccttctcaaatgcggagaacgggcaacaactttgagttcagctaccagtttgaggacgtgccttttcacagcagctacgcgcatagccaaagcctggaccggctgatgaaccccctcatcgaccagtacctgtactacctgtctcggactcagtccacgggaggtaccgcaggaactcagcagttgctattttctcaggccgggcctaataacatgtcggctcaggccaaaaactggctacccgggccctgctaccggcagcaacgcgtctccacgacactgtcgcaaaataacaacagcaactttgcttggaccggtgccaccaagtatcatctgaatggcagagactctctggtaaatcccggtgtcgctatggcaacgcacaaggacgacgaagagcgattttttccatccagcggagtcttgatgtttgggaaacagggagctggaaaagacaacgtggactatagcagcgttatgctaaccagtgaggaagaaatcaaaaccaccaacccagtggccacagaacagtacggcgtggtggccgataacctgcaacagcaaaacgccgctcctattgtaggggccgtcaacagtcaaggagccttacctggcatggtctggcagaaccgggacgtgtacctgcagggtcctatctgggccaagattcctcacacggacggcaactttcatccttcgccgctgatgggaggctttggactgaaacacccgcctcctcagatcctgattaagaatacacctgttcccgcggatcctccaactaccttcagtcaagccaagctggcgtcgttcatcacgcagtacagcaccggacaggtcagcgtggaaattgaatgggagctgcagaaagagaacagcaagcgctggaacccagagattcagtatacttccaactactacaaatctacaaatgtggactttgctgtcaatactgagggtacttattcagagcctcgccccattggcacccgttacctcacccgtaacctgtaa

SEQ ID NO: 332 - protein, 738 aa, Adeno-associated virus
MAADGYLPDWLEDNLSEGIREWWDLKPGAPKPKANQQKQDDGRGLVLPGYKYLGPFNGLDKGEPVNAADAAALEHDKAYDQQLKAGDNPYLRYNHADAEFQERLQEDTSFGGNLGRAVFQAKKRVLEPLGLVEEGAKTAPGKKRPVEPSPQRSPDSSTGIGKTGQQPAKKRLNFGQTGDSESVPDPQPIGEPPAGPSGLGSGTMAAGGGAPMADNNEGADGVGSSSGNWHCDSAWLGDRVITTSTRPWALPTYNNHLYKQISNGTSGGSTNDNTYFGYSTPWGYFDFNRFHCHFSPRDWQRLINNNWGFRPKRLNFKLFNIQVKEVTQNEGTKTIANNLTSTIQVFTDSEYQLPYVLGSAHQGCPPPFPADVFMIPQYGYLTLNNGSQAVGRSSFYCLEYFPSQMRRTGNNFEFSYQFEDVPFHSSYAHSQSLDRLMNPLIDQYLYYLSRTQSTGGTAGTQQLLFSQAGPNNMSAQAKNWLPGPCYRQQRVSTTLSQNNNSNFAWTGATKYHLNGRDSLVNPGVAMATHKDDEERFFPSSGVLMFGKQGAGKDNVDYSSVMLTSEEEIKTTNPVATEQYGVVADNLQQQNAAPIVGAVNSQGALPGMVWQNRDVYLQGPIWAKIPHTDGNFHPSPLMGGFGLKHPPPQILIKNTPVPADPPTTFSQAKLASFITQYSTGQVSVEIEWELQKENSKRWNPEIQYTSNYYKSTNVDFAVNTEGTYSEPRPIGTRYLTRNL

SEQ ID NO: 333 - protein, 735 aa, Adeno-associated virus
MAADGYLPDWLEDTLSEGIRQWWKLKPGPPPPKPAERHKDDSRGLVLPGYKYLGPFNGLDKGEPVNEADAAALEHDKAYDRQLDSGDNPYLKYNHADAEFQERLKEDTSFGGNLGRAVFQAKKRVLEPLGLVEEPVKTAPGKKRPVEHSPVEPDSSSGTGKAGQQPARKRLNFGQTGDADSVPDPQPLGQPPAAPSGLGSTTMATGSGAPMADNNEGADGVGNSSGNWHCDSQWLGDRVITTSTRTWALPTYNNHLYKQISSQSGASNDNHYFGYSTPWGYFDFNRFHCHFSPRDWQRLINNNWGFRPKRLNFKLFNIQVKEVTQNDGTTTIANNLTSTVQVFTDSEYQLPYVLGSAHQGCLPPFPADVFMVPQYGYLTLNNGSQAVGRSSFYCLEYFPSQMLRTGNNFQFSYTFEDVPFHSSYAHSQSLDRLMNPLVDQYLYYLNKTQTNSGTLQQSRLLFSQAGPTNMSLQAKNWLPGPCYRQQRLSKQANDNNNSNFPWTAATKYHLNGRDSLVNPGPAMASHKDDEEKFFPMHGTLIFGKQGTNANDADLENVMITDEEEIRTTNPVATEQYGTVSNNLQNSNTGPTTGTVNHQGALPGMVWQDRDVYLQGPIWAKIPHTDGHFHPSPLMGGFGLKHPPPQIMIKNTPVPANPPTNFSSAKFASFITQYSTGQVSVEIEWELQKENSKRWNPEIQYTSNYNKSVNVDFTVDTNGVYSEPRPIGTRYLTRNL

SEQ ID NO: 334 - DNA, 3158 bp, Adeno-associated virus
  source 1..3158: mol_type = unassigned DNA
gattgaatttagcggccgcgaattcgcccttgctgcgtcaactggaccaatgagaactttcctttcaatgattgcgtcgacaagatggtgatctggtgggaggagggaaagatgaccgccaaggtcgtggagtcggccaaagccattctcggaggaagcaaggtgcgcgcggaccagaaatgcaagtcctcggcccagatagacccgactcccgtgattgtcacctccaacaccaacatgtgcgccgtgattgacgggaactcaacgaccttcgaacaccagcagccgttgcaagaccggatgttcaaatttgaactcacccgccgtctggatcatgactttgggaaggtcaccaagcaggaagtcaaagactttttccggtgggcaaaggatcacgtggttgaggtggagcatgaattctacgtcaaaaagggtggagctaagaaaagacccgcccccagtgacgcagatataagtgagcccaaacgggcgcgcgagtcagttgcgcagccatcgacgtcagacgcggaagcttcgatcaactacgcgggcaggtaccaaaacaaatgttctcgtcacgtgggcatgaatctgatgctgtttccctgcagacaatgcgagagaatgaatcagaattcaaatatctgcttcactcacggacagaaagactgtttagagtgctttcccgtgtcagaatctcaacccgtttctgtcgtcaaaaaggcgtatcagaaactttgctacattcatcatatcatgggaaaggtgccagacgcttgcactgcctgcgatctggtcaatgtggatttggatgactgcatctctgaacaataaatgatttaaatcaggtatggctgccgatggttatcttccagattggctcgaggacactctctctgaaggaataagacagtggtggaagctcaaacctggcccaccaccaccaaagcccgcagagcggcataaggacgacagcaggggtcttgtgcttcctgggtacaagtacctcggacccttcaacggactcgacaagggggagccggtcaacgaggcagacgccgcggccctcgagcacgacaaggcctacgaccggcagctcgacagcggagacaacccgtacctcaagtacaaccacgccgacgcggagtttcaggagcgccttaaagaagatacgtcttttgggggcaacctcggacgagcagtcttccaggcaaaaaagagggttcttgaacctctgggcctggttgaggaacctgttaaaacggctccgggaaaaaagaggccggtagagcactctcctgtggagccagactcctcctcgggaaccggaaaagcgggccagcagcctgcaagaaaaagattgaatttcggtcagactggagacgcagactccgtacctgacccccagcctctcggacagccaccagcagccccctctggtctgggatctactacaatggctacaggcagtggcgcaccaatggcagacaataacgagggtgccgatggagtgggtaattcctcgggaaattggcattgcgattcccaatggctgggcgacagagtcatcaccaccagcacccgcacctgggccctgcccacctacaacaaccacctctacaagcaaatctccagccaatcaggagcctcaaacgacaaccactactttggctacagcaccccctgggggtattttgacttcaacagattccactgccacttttcaccacgtgactggcaaagactcatcaacaacaactggggattccgacccaagagactcaacttcaagctctttaacattcaagtcaaagaggtcacgcagaatgacggtacgacgacgattgccaataaccttaccagcacggttcaggtgtttactgactcggagtaccagctcccgtacgtcctcggctcggcgcatcaaggatgcctcccgccgtttccagcggacgtcttcatggtcccacagtatggatacctcaccctgaacaacgggagtcaggcagtaggacgctcttcattttactgcctggagtactttccttctcagatgctgcgtaccggaaacaactttcaattcagctacacttttgaagacgtgcctttccacagcagctacgctcacagccagagtctggatcggctgatgaatcctctggtcgaccagtacctgtattatctgaacaagacacaaacaaatagtggaactcttcagcagtctcggctactgtttagccaagctggacccaccaacatgtctcttcaagctaaaaactggctgcctggaccttgctacagacagcagcgtctgtcaaagcaggcaaacgacaacaacaacagcaactttccctggactgcagctacaaagtatcatctaaatggccgggactcgttggttaatccaggaccagctatggccagtcacaaggatgacgaagaaaagtttttccccatgcatggaacccttatatttggtaaacaaggaacaaatgccaacgacgcggatttggaaaatgtcatgattacagatgaagaagaaatcaggaccaccaatcccgtggctacggagcagtacggaactgtatcaaataatttgcaaaactcaaacactggtccaactactggaactgtcaatcaccaaggagcgttacctggtatggtgtggcaggatcgagacgtgtacctgcagggacccatttgggccaagattcctcacaccgatggacactttcatccttctccactgatgggaggttttggactcaaacacccacctcctcaaatcatgatcaaaaacactcccgttccagccaatcctcccacaaacttcagttctgccaagtttgcttctttcatcacacagtattccacggggcaggtcagcgtggagatcgagtgggagctgcagaaggagaacagcaaacgctggaatcccgaaattcagtacacttccaactacaacaaatctgttaatgtggactttactgtggacactaatggtgtgtattcagagcctcgccccattggcaccagatacctgactcgtaatctgtaattgcttgttaatcaataaaccgtttaattcgtttcagttgaactttggtctctgcgaagggcgaattcgtttaaacctgcaggactagtccctttagtga

SEQ ID NO: 335 - protein, 735 aa, Adeno-associated virus
MAADGYLPDWLEDTLSEGIRQWWKLKPGPPPPKPAERHKDDSRGLVLPGYKYLGPFNGLDKGEPVNEADAAALEHDKAYDRQLDSGDNPYLKYNHADAEFQERLKEDTSFGGNLGRAVFQAKKRVLEPLGLVEEPVKTAPGKKRPVEHPPVEPDSSSGTGKAGQQPARKRLNFGQTGDADSVPDPQPLGQPPAAPSGLGSTTMATGSGAPMADNNEGADGVGNSSGNWHCDSQWLGDRVITTSTRTWALPTYNNHLYKQISSQSGASNDNHYFGYSTPWGYFDFNRFHCHFSPRDWQRLINNNWGFRPKRLNFKLFNIQVKEVTQNDGTTTIANNLTSTVQVFTDSEYQLPYVLGSAHQGCLPPFPADVFMVPQYGYLTLNNGSQAVGRSSFYCLEYFPSQMLRTGNNFQFSYTFEDVPFHSSYAHSQSLDRLMNPLIDQYLYYLNKTQTNSGTLQQSRLLFSQAGPTNMSLQAKNRLPGPCYRQQRLSKQANDNNNSNFPWTAATKYHLNGRDSLVNPGPAMASHKDDEEKFFPMHGTLIFGKQGTNANDADLENVMITDEEEIRTTNPVATEQYGTVSNNLQNSNTGPTTGTVNHQGALPGMVWQDRDVYLQGPIWAKIPHTDGHFHPSPLVGGFGLKHPPPQIMIKNTPVPANPPTNFSSAKFASFITQYSTGQVSVEIEWELQKENSKRWNPEIQYTSNYNKSVNVDFTVDTNGVYSEPRPIGTRYLTRNL

SEQ ID NO: 336 - DNA, 3159 bp, Adeno-associated virus
  source 1..3159: mol_type = unassigned DNA
gattgaatttagcggccgcgaattcgcccttgctgcgtcaactggaccaatgagaactttcctttcaatgattgcgtcgacaagatggtgatctggtgggaggagggaaagatgaccgccaaggtcgtggagtcggccaaagccattctcggaggaagcaaggtgcgcgtggaccagaaatgcaagtcctcggcccagatagacccgactcccgtgattgtcacctccaacaccgacatgtgcgccgtgattgacgggaactcaacgaccttcgaacaccagcagccgttgcaagaccggatgttcaaatttgaactcacccgccgtctggatcatgactttgggaaggtcaccaagcaggaagtcaaagactttttccggtgggcaaaggatcacgtggttgaggtggagcatgaattctacgtcaaaaagggtggagctaagaaaagacccgcccccagtgacgcagatataagtgagcccaaacgggcgcgcgagtcagttgcgcagccatcgacgtcagacgcggaagcttcgatcaactacgcggacaggtaccaaaacaaatgttctcgtcacgtgggcatgaatctgatgctgtttccctgcagacaatgcgagagaatgaatcagaattcaaatatctgcttcactcacggacagaaagactgtttagagtgctttcccgtgtcagaatctcaacccgtttctgtcgtcaaaaaggcgtatcagaaactttgctacattcatcatatcatgggaaaggtgccagacgcttgcactgcctgcgatctggtcaatgtggatttggatgactgcatctctgaacaataaatgatttaaatcaggtatggctgccgatggttatcttccagattggctcgaggacactctctctgaaggaataagacagtggtggaagctcaaacctggcccaccaccaccaaagcccgcagagcggcataaggacgacagcaggggtcttgtgcttcctgggtacaagtacctcggacccttcaacggactcgacaagggggagccggtcaacgaggcagacgccgcggccctcgagcacgacaaggcctacgaccggcagctcgacagcggagacaacccgtacctcaagtacaaccacgccgacgcggagtttcaggagcgccttaaagaagatacgtcttttgggggcaacctcggacgagcagtcttccaggcaaaaaagagggttcttgaacctctgggcctggttgaggaacctgttaaaacggctccgggaaaaaagaggccggtagagcaccctcctgtggagccagactcctcctcgggaaccggaaaagcgggccagcagcctgcaagaaaaagattgaatttcggtcagactggagacgcagactccgtacctgacccccagcctctcggacagccaccagcagccccctctggtctgggatctactacaatggctacaggcagtggcgcaccaatggcagacaataacgagggtgccgatggagtgggtaattcctcgggaaattggcattgcgattcccaatggctgggcgacagagtcatcaccaccagcacccgcacctgggccctgcccacctacaacaaccacctctacaagcaaatctccagccaatcaggagcctcaaacgacaaccactactttggctacagcaccccctgggggtattttgacttcaacagattccactgccacttttcaccacgtgactggcaaagactcatcaacaacaactggggattccgacccaagagactcaacttcaagctctttaacattcaagtcaaagaggtcacgcagaatgacggtacgacgacgattgccaataaccttaccagcacggttcaggtgtttactgactcggagtaccagctcccgtacgtcctcggctcggcgcatcaaggatgcctcccgccgtttccagcggacgtcttcatggtcccacagtatggatacctcaccctgaacaacgggagtcaggcagtaggacgctcttcattttactgcctggagtactttccttctcagatgctgcgtaccggaaacaactttcagttcagctacacttttgaagacgtgcctttccacagcagctacgctcacagccagagtctggatcggctgatgaatcctctgatcgaccagtacctgtattatctgaacaagacacaaacaaatagtggaactcttcagcagtctcggctactgtttagccaagctggacccaccaacatgtctcttcaagctaaaaaccggctgcctggaccttgctacagacagcagcgtctgtcaaagcaggcaaacgacaacaacaacagcaactttccctggaccgcagctacaaagtatcatctaaatggccgggactcgttggttaatccaggaccagctatggccagtcacaaggatgacgaagaaaagtttttccccatgcatggaacccttatatttggtaaacaaggaacaaatgccaacgacgcggatttggaaaatgtcatgattacagatgaagaagaaatcaggaccaccaatcccgtggctacggagcagtacggaactgtatcaaataatttgcaaaactcaaacactggtccaactactggaactgtcaatcaccaaggagcgttacctggtatggtgtggcaggatcgagacgtgtacctgcagggacccatttgggccaagattcctcacaccgatggacactttcatccttctccactggtgggaggttttggactcaaacacccacctcctcaaatcatgatcaaaaacactcccgttccagccaatcctcccacaaacttcagttctgccaagtttgcttctttcatcacacagtattccacggggcaggtcagcgtggagatcgagtgggagctgcagaaggagaacagcaaacgctggaatcccgaaattcagtacacttccaactacaacaaatctgttaatgtggactttactgtggacactaatggtgtgtattcagagcctcgccccattggcaccagatacctgactcgtaatctgtaattgcttgttaatcaataaaccgtttaattcgtttcagttgaactttggtctctgcgaagggcgaattcgtttaaacctgcaggactagtccctttagtgag

SEQ ID NO: 337 - DNA, 2208 bp, Adeno-associated virus
  source 1..2208: mol_type = unassigned DNA
atggctgccgatggttatcttccagattggctcgaggacactctctctgaaggaataagacagtggtggaagctcaaacctggcccaccaccaccaaagcccgcagagcggcataaggacgacagcaggggtcttgtgcttcctgggtacaagtaccttggacccttcaacggactcgacaagggagagccggtcaacgaggcagacgccgcggccctcgagcacgacaaggcctacgaccggcagctcgacagcggagacaacccgtaccccaagtacaaccacgccgacgcggagttccaggagcgtcttaaagaagatacgtcttttgggggcaacctcggacgagcagtcttccaggcgaaaaagagggttcttgaacctctgggcctggttgaggaacctgttaagacggctccgggaaaaaagaggccggtagagcactctcctgcggagccagactcctcctcgggaaccggaaaagcgggccagcagcctgcaagaaagagattgaatttcggtcagactggagacgcagactccgtacctgacccccagcctctcggacagccaccagcagccccctctggtctgggaactaatacgatggctacaggcagtggcgcaccaatggcagacaataacgagggcgccgacggagtgggtaattcctcgggaaattggcattgcgattccacatggatgggcgacagagtcatcaccaccagcacccgcacctgggctctgcccacctacaacaaccacctctacaagcagatttccagccaatcaggagcctcaaacgacaaccactactttggctacagcaccccttgggggtattttgacttcaacagattccactgccacttttcgccacgtgactggcaaagactcatcaacaacaattggggattccggcccaaaagactcaacttcaagctctttaacattcaagtcaaggaggtcacgcagaatgacggtacgacgacgattgccaataaccttaccagcacggttcaggtgtttactgactcggagtaccagctcccgtacgtcctcggctcggcgcatcaaggatgcctcccgccgttcccagcagacgtcttcatggtgccacagtatggatacctcaccctgaacaacgggagtcaggcagtaggacgctcttcattttactgcctggagtactttccttctcagatgctgcgtaccggaaacaactttaccttcagctacacctttgaggacgttcctttccacagcagctacgcccacagccagagtttggaccgtctcatgaatcctctcatcgaccagtacctgtattacttgagcagaacaaacactccaagcggaaccaccacgcagtcaaggcttcagttttctcaggccggagcaagtgacattcgggaccagtctaggaactggcttcctggaccctgttaccgccagcagcgagtatcaaagacatctgcggataacaacaacagtgaatactcgtggactggagctaccaagtaccaccttaatggaagagactctctggtgaatccgggcccggccatggccagccacaaggacgatgaagaaaagttttttcctcagagcggggttctcatctttggaaaacaagactcgggaaaaactaatgtggacattgaaaaggtcatgattacagacgaagaggaaatcaggaccaccaatcccgtggctacggagcagtatggttctgtatctaccaacctccagagcggcaacacacaagcagctacctcagatgtcaacacacaaggcgttcttccaggcatggtgtggcaggacagagacgtgtacctgcaggggcccatctgggcaaagattccacacacggacggacattttcacccctctcccctcatgggcggattcggacttaaacaccctcccccgcagattctcatcaagaacaccccggtacctgcgaatccttcgactaccttcagtgcggcaaagtttgcttccttcattacacagtactccacggggcaggtcagcgtggagatcgagtgggagctgcagaaggagaacagcaaacgctggaatcccgagattcagtacacttccaactacaacaaatctgttaatgtggactttactgtggacactaatggtgtgtattcagagcctcgccccattggcaccaggtacctgactcgtaatctgtaa

SEQ ID NO: 338 - protein, 735 aa, Adeno-associated virus
MAADGYLPDWLEDTLSEGIRQWWKLKPGPPPPKPAERHKDDSRGLVLPGYKYLGPFNGLDKGEPVNEADAAALEHDKAYDRQLDSGDNPYPKYNHADAEFQERLKEDTSFGGNLGRAVFQAKKRVLEPLGLVEEPVKTAPGKKRPVEHSPAEPDSSSGTGKAGQQPARKRLNFGQTGDADSVPDPQPLGQPPAAPSGLGTNTMATGSGAPMADNNEGADGVGNSSGNWHCDSTWMGDRVITTSTRTWALPTYNNHLYKQISSQSGASNDNHYFGYSTPWGYFDFNRFHCHFSPRDWQRLINNNWGFRPKRLNFKLFNIQVKEVTQNDGTTTIANNLTSTVQVFTDSEYQLPYVLGSAHQGCLPPFPADVFMVPQYGYLTLNNGSQAVGRSSFYCLEYFPSQMLRTGNNFTFSYTFEDVPFHSSYAHSQSLDRLMNPLIDQYLYYLSRTNTPSGTTTQSRLQFSQAGASDIRDQSRNWLPGPCYRQQRVSKTSADNNNSEYSWTGATKYHLNGRDSLVNPGPAMASHKDDEEKFFPQSGVLIFGKQDSGKTNVDIEKVMITDEEEIRTTNPVATEQYGSVSTNLQSGNTQAATSDVNTQGVLPGMVWQDRDVYLQGPIWAKIPHTDGHFHPSPLMGGFGLKHPPPQILIKNTPVPANPSTTFSAAKFASFITQYSTGQVSVEIEWELQKENSKRWNPEIQYTSNYNKSVNVDFTVDTNGVYSEPRPIGTRYLTRNL

SEQ ID NO: 339 - DNA, 2208 bp, Adeno-associated virus
  source 1..2208: mol_type = unassigned DNA
atggctgccgatggttatcttccagattggctcgaggacactctctctgaaggaataagacagtggtggaagctcaaacctggcccaccaccaccaaagcccgcagagcggcataaggacgacagcaggggtcttgtgcttcctgggtacaagtaccttggacccttcaacggactcgacaagggagagccggtcaacgaggcagacgccgcggccctcgagcacgacaaggcctacgaccggcagctcgacggcggagacaacccgtacctcaagtacaaccacgccgacgcggagttccaggagcgtcttaaagaagatacgtcttttgggggcaacctcggacgagcagtcttccaggcgaaaaagagggttcttgaacctctgggcctggttgaggaacctgttaagacggctccgggaaaaaagaggccggtagagcactctcttgcggagccagactcctcctcgggaaccggaaaagcgggccagcagcctgcaagaaggagattgaatttcggtcagactggagacgcagactccgtacctgacccccagcctctcggacagccaccagcagccccctctggtctgggaactaatacgatggctacaggcagtggcgcaccaatggcagacaataacgagggcgccgacggagtgggtaattcctcgggaaattggcattgcgattccacatggatgggcgacagagtcatcaccaccagcacccgcacctgggctctgcccacctacaacaaccacctctacaggcagatttccagccaatcaggagcctcaaacgacaaccactactttggctacagcaccccttgggggtattttgacttcaacagattccactgccacttttcgccacgtgactggcaaagactcatcaacaacaattggggatcccggcccaaaagactcaacttcaagctctttaacattcaagtcaaggaggtcacgcagaatgacggtacgacgacgattgccaataaccttaccagcacggttcaggtgtttactgactcggagtaccagctcccgtacgtcctcggctcggcgcatcaaggatgcctcccgccgttcccagcagacgtcttcatggtgccacagtatggatacctcaccctgaacaacgggagtcaggcagtaggacgctcttcattttactgcctggagtactttccttctcagatgctgcgtaccggaaacaactttaccttcagctacacctttgaggacgttcctttccacagcagctacgcccacagccagagtttggaccgtctcatgaatcctctcgtcgaccagtacctgtattacttgagcagaacaaacactccaagcggaaccaccacgcagtcaaggcttcagttttctcaggccggagcaagtgacattcgggaccagtctaggaactggcttcctggaccctgttaccgccagcagcgagtatcaaagacatctgcggataacaacaacagtgaatactcgtggactggagctaccaagtaccaccttaatggaagagactctctggtgaatccgggcccggccatggccagccacaaggacgatgaagaaaagttttttcctcagagcggggttctcatctttggaaaacaagactcgggaaaaactaatgtggacattgaaaaggtcatgattacagacgaagaggaaatcaggaccaccaatcccgtggctacggagcagtatggttctgtatctaccaacctccagagcggcaacacacaagcagctacctcagatgtcaacacacaaggcgttcttccaggcatggtgtggcaggacagagacgtgtacctgcaggggcccatctgggcaaagattccacacacggacggacattttcacccctctcccctcatgggcggattcggacttaaacaccctcccccgcagattctcatcaagaacaccccggtacctgcgaatccttcgactaccttcagtgcggcaaagtttgcttccttcattacacagtactccacggggcaggtcagcgtggagatcgagtgggagctgcagaaggagaacagcaaacgctggaatcccgagattcagtacacttccaactacaacaaatctgttaatgtggactttactgtggacactaatggtgtgtattcagagcctcgccccattggcaccagatacctgactcgtaatctgtaa

SEQ ID NO: 340 - protein, 735 aa, Adeno-associated virus
MAADGYLPDWLEDTLSEGIRQWWKLKPGPPPPKPAERHKDDSRGLVLPGYKYLGPFNGLDKGEPVNEADAAALEHDKAYDRQLDGGDNPYLKYNHADAEFQERLKEDTSFGGNLGRAVFQAKKRVLEPLGLVEEPVKTAPGKKRPVEHSLAEPDSSSGTGKAGQQPARRRLNFGQTGDADSVPDPQPLGQPPAAPSGLGTNTMATGSGAPMADNNEGADGVGNSSGNWHCDSTWMGDRVITTSTRTWALPTYNNHLYRQISSQSGASNDNHYFGYSTPWGYFDFNRFHCHFSPRDWQRLINNNWGSRPKRLNFKLFNIQVKEVTQNDGTTTIANNLTSTVQVFTDSEYQLPYVLGSAHQGCLPPFPADVFMVPQYGYLTLNNGSQAVGRSSFYCLEYFPSQMLRTGNNFTFSYTFEDVPFHSSYAHSQSLDRLMNPLVDQYLYYLSRTNTPSGTTTQSRLQFSQAGASDIRDQSRNWLPGPCYRQQRVSKTSADNNNSEYSWTGATKYHLNGRDSLVNPGPAMASHKDDEEKFFPQSGVLIFGKQDSGKTNVDIEKVMITDEEEIRTTNPVATEQYGSVSTNLQSGNTQAATSDVNTQGVLPGMVWQDRDVYLQGPIWAKIPHTDGHFHPSPLMGGFGLKHPPPQILIKNTPVPANPSTTFSAAKFASFITQYSTGQVSVEIEWELQKENSKRWNPEIQYTSNYNKSVNVDFTVDTNGVYSEPRPIGTRYLTRNL

SEQ ID NO: 341 - protein, 738 aa, Adeno-associated virus
MAADGYLPDWLEDNLSEGIREWWDLKPGAPKPKANQQKQDDGRGLVLPGYKYLGPFNGLDKGEPVNAADAAALEHDKAYDQQLKAGDNPYLRYNHADAEFQERLQEDTSFGGNLGRAVFQAKKRVLEPLGLVEEAAKTAPGKKRPVEPSPQRSPDSSAGIGKKGQQPAKKRLNFGQTGDSESVPDPQPIGEPPAGPSGLGSGTMAAGGGAPMADNNEGADGVGSSSGNWHCDSTWLGDRVITTSTRTWALPTYNNHLYKQISNGTSGGSTNDNTYFGYSTPWGYFDFNRFHCHFSPRDWQRLINNNWGFRPKRLSFKLFNIQVKEVTQNEGTETIANNLTSTIQVFTDSEYQLPYVLGSAHQGCLPPFPADVFMIPQYGYLTLNNGSQAVGRSSFYCLEYFPSQMLRTGNNFEFSYTFEDVPFHSSCAHSQSSDRLMNPLIDQYLYYLSRTRSTGGTQGTQQLLFSQAGPANMSAQAKNWLPGPCYRQQRVSTTLSQNNNSNFAWTGATKYHLNGRDSLVNPGVAMATHKDDEERFFPSSGVLMFGKQGAGRDNVDYSSVMLTSEEEIKTTNPVATEQYGVVADNLQQTNTGPIVGNVNSQGALPGMVWQNRDVYLQGPIWAKIPHTDGNFHPSPLMGGFGLKHPPPQILIKNTPVPADPPTTFSQAKLASFITQYSTGQVSVEIEWELQKENSKRWNPEIQYTSNYYKSTNVDFAVNTEGTYSEPRPIGTRYLTRNL

SEQ ID NO: 342 - DNA, 2217 bp, Adeno-associated virus
  source 1..2217: mol_type = unassigned DNA
atggctgctgacggttatcttccagattggctcgaggacaacctctctgagggcattcgcgagtggtgggacctgaaacctggagcccccaagcccaaggccaaccagcagaagcaggacgacggccggggtctggtgcttcttggctacaagtacctcggacccttcaacggactcgacaagggggagcccgtcaatgcggcggacgcagcggccctcgagcacgacaaggcctacgaccagcagctcaaagcgggtgacaatccgtacctgcggtataaccacgccgacgccgagtttcaggagcgtctgcaagaagatacgtcttttgggggcaacctcgggcgagcagtcttccaggccaagaagcgggttctcgaacctctcggtctggttgaggaagctgctaagacggctcctggaaagaagagaccggtagaaccgtcacctcagcgttcccccgactcctccacgggcatcggcaagaaaggccagcagcccgctaaaaagagactgaactttggtcagactggcgactcagagtcagtccccgaccctcaaccaatcggagaaccaccagcaggcccctctggtctgggatctggtacaatggctgcaggcggtggcgctccaatggcagacaataacgaaggcgccgacggagtgggtagttcctcaggaaattggcattgcgattccacatggctgggcgacagagtcatcaccaccagcacccgaacctgggccctgcccacctacaacaaccacctctacaagcaaatatccaatgggacatcgggaggaagcaccaacgacaacacctacttcggctacagcaccccctgggggtattttgacttcaacagattccactgccacttctcaccacgtgactggcagcgactcatcaacaacaactggggattccggccaaaaagactcagcttcaagctcttcaacatccaggtcaaggaggtcacgcagaatgaaggcaccaagaccatcgccaataaccttaccagcacgattcaggtatttacggactcggaataccagctgccgtacgtcctcggctccgcgcaccagggctgcctgcctccgttcccggcggacgtcttcatgattccccagtacggctaccttacactgaacaatggaagtcaagccgtaggccgttcctccttctactgcctggaatattttccatctcaaatgctgcgaactggaaacaattttgaattcagctacaccttcgaggacgtgcctttccacagcggctacgcacacagccagagcttggaccgactgatgaatcctctcatcgaccagtacctgtactacttatccagaactcagtccacaggaggaactcaaggtacccagcaattgttattttctcaagctgggcctgcaaacatgtcggctcaggctaagaactggctacctggaccttgctaccggcagcagcgagtctctacgacactgtcgcaaaacaacaacagcaactttgcttggactggtgccaccaaatatcacctgaacggaagagactctttggtaaatcccggtgtcgccatggcaacccacaaggacgacgaggaacgcttcttcccgtcgagtggagtcctgatgtttggaaaacagggtgctggaagagacaatgtggactacagcagcgttatgctaaccagcgaagaagaaattaaaaccactaaccctgtagccacagaacaatacggtgtggtggctgacaacttgcagcaaaccaatacagggcctattgtgggaaatgtcaacagccaaggagccttacctggcatggtctggcagaaccgagacgtgtacctgcagggtcccatctgggccaagattcctcacacggacggcaacttccacccttcaccgctaatgggaggatttggactgaagcacccacctcctcagatcctgatcaagaacacgccggtacctgcggatcctccaacgacgttcagccaggcgaaattggcttccttcattacgcagtacagcaccggacaggtcagcgtggaaatcgagtgggagctgcagaaggagaacagcaaacgctggaacccagagattcagtacacttcaaactactacaaatctacaaatgtggactttgctgtcaatacagagggaacttattctgagcctcgccccattggtactcgttacctcacccgtaatctgtaa

SEQ ID NO: 343 - protein, 738 aa, Adeno-associated virus
MAADGYLPDWLEDNLSEGIREWWDLKPGAPKPKANQQKQDDGRGLVLLGYKYLGPFNGLDKGEPVNAADAAALEHDKAYDQQLKAGDNPYLRYNHADAEFQERLQEDTSFGGNLGRAVFQAKKRVLEPLGLVEEAAKTAPGKKRPVEPSPQRSPDSSTGIGKKGQQPAKKRLNFGQTGDSESVPDPQPIGEPPAGPSGLGSGTMAAGGGAPMADNNEGADGVGSSSGNWHCDSTWLGDRVITTSTRTWALPTYNNHLYKQISNGTSGGSTNDNTYFGYSTPWGYFDFNRFHCHFSPRDWQRLINNNWGFRPKRLSFKLFNIQVKEVTQNEGTKTIANNLTSTIQVFTDSEYQLPYVLGSAHQGCLPPFPADVFMIPQYGYLTLNNGSQAVGRSSFYCLEYFPSQMLRTGNNFEFSYTFEDVPFHSGYAHSQSLDRLMNPLIDQYLYYLSRTQSTGGTQGTQQLLFSQAGPANMSAQAKNWLPGPCYRQQRVSTTLSQNNNSNFAWTGATKYHLNGRDSLVNPGVAMATHKDDEERFFPSSGVLMFGKQGAGRDNVDYSSVMLTSEEEIKTTNPVATEQYGVVADNLQQTNTGPIVGNVNSQGALPGMVWQNRDVYLQGPIWAKIPHTDGNFHPSPLMGGFGLKHPPPQILIKNTPVPADPPTTFSQAKLASFITQYSTGQVSVEIEWELQKENSKRWNPEIQYTSNYYKSTNVDFAVNTEGTYSEPRPIGTRYLTRNL

SEQ ID NO: 344 - protein, 735 aa, Adeno-associated virus
MAADGYLPDWLEDTLSEGIRQWWKLKPGPPPPKPAERHKDDSRGLVLPGYKYLGPFNGLDKGEPVNEADAAALEHDKAYDRQLDSGDNPYLKYNHADAEFQERLKEDTSFGGNLGRAVFQAKKRVLEPLGLVEPPVKTAPGKKRPVEHSPAEPDSSSGTGKAGQQPARKRLNFGQTGDADSVPDPQPLGQPPAAPSGLGSTTMATGSGAPMADNNEGADGVGNSSGNWHCDSQWLGDRVITTSTRTWALPTYNNHLYKQISSQSGASNDNHYFGYSTPWGYFDFNRFHCHFSPRDWQRLINNNWGFRPKRLNFKLFNIQVKEVTQNDGTTTIANNLTSTVQVFTDSEYQLPYVLGSAHQGCLPPFPADVFMVPQYGYLTLNNGSQAVGRSSFYCLEYFPSQMLRTGNNFQFSYTFEDVPFHSSYAHSQSLDRLMNPLIDQYLYYLNKTQSNSGTLQQSRLLFSQAGPTSMSLQAKNWLPGPCYRQQRLSKQANDNNNSNFPWTAATKYHLNGRDSLVNPGPAMASHKDDEEKFFPMHGTLIFGKQGTNANDADLDNVMITDEEEIRTTNPVATEQYGYVSNNLQNSNTGPTTGTVNHQGALPGMVWQDRDVYLQGPIWAKIPHTDGHFHPSPLMGGFGLKHPPPQIMIKNTPVPANPPTNFSSAKFASFITQYSTGQVSVEIEWELQKENSKRWNPEIQYTSNYNKSVNVDFTVDTNGVYSEPRPIGTRYLTRNL

SEQ ID NO: 345 - protein, 735 aa, Adeno-associated virus
MAADGYLPDWLEDTLSEGIRQWWKLKPGPPPPKPAERHKDDSRGLVLPGYKYLGPFNGLDKGEPVNEADAAALEHDKAYDRQLDSGDNPYLKYNHADAEFQERLKEDTSFGGNLGRAVFQAKKRVLEPLGLVEGPVKTAPGKKRPVEHSPAEPDSSSGTGKAGQQPARKRLNFGQTGDADSVPDPQPLGQPPAAPSGLGSTTMATGSGAPMADNNEGADGVGNSSGNWHCDSQWLGDRVITTSTRTWALPTYNNHLYKQISSQSGASNDNHYFGYSTPWGYFDFNRFHCHFSPRDWQRLINNNWGFRPKRLNFKLFNIQVKEVTQNDGTTTIANNLTSTVQVFTDSEYQLPYVLGSAHQGCLPPFPADVFMVPQYGYLTLNNGSQAVGRSSFYCLEYFPSQMLRTGNNFQFSYTFEDVPFHSSYAHSQSLDRLMNPLIDQYLYYLNKTQSNSGTLQQSRLLFSQAGPTSMSLQAKNWLPGPCYRQQRLSKQANDNNNSNFPWTAATKYHLNGRDSLVNPGPAMASHKDDEEKFFPMHGTLIFGKQGTNANDADLDNVMITDEEEIRTTNPVATEQYGYVSNNLQNSNTGPTTGTVNHQGALPGMVWQDRDVYLQGPIWAKIPHTDGHFHPSPLMGGFGLKHPPPQIMIKNTPVPANPPTNFSSAKFASFITQYSTGQVSVEIEWELQKENSKRWNPEIQYTSNYNKSVNVDFTVDTNGVYSEPRPIGTRYLTRNL

SEQ ID NO: 346 - DNA, 2208 bp, Adeno-associated virus
  source 1..2208: mol_type = unassigned DNA
atggctgccgatggttatcttccagattggctcgaggacactctctctgaaggaataagacagtggtggaagctcaaacctggcccaccaccaccaaagcccgcagagcggcataaggacgacagcaggggtcttgtgcttcctgggtacaagtacctcggacccttcaacggactcgacaagggggagccggtcaacgaggcagacgccgcggccctcgagcacgacaaggcctacgaccggcagctcgacagcggagacaacccgtacctcaagtacaaccacgccgacgcggagtttcaggagcgtcttaaagaagatacgtcttttgggggcaacctcggacgagcagtcttccaggcgaaaaagagggttcttgaacctctgggcctggttgagggacctgttaagacggctccgggaaaaaagaggccggtagagcactctcctgcggagccagactcctcctcgggaaccggaaaagcgggccagcagcctgcaagaaaaagattgaattttggtcagactggagacgcagactccgtacctgacccccagcctctcggacagccaccagcagccccctctggtttgggatctactacaatggctacaggcagtggcgcaccaatggcagacaataacgagggtgccgatggagtgggtaattcctcaggaaattggcattgcgattcccaatggctgggcgacagagtcatcaccaccagcacccgaacctgggccctgcccacctacaacaaccacctctacaagcaaatctcaagccaatcaggagcctcaaacgacaaccactactttggctacagcaccccttgggggtattttgacttcaacagattccactgccacttttcaccacgtgactggcaaagactcatcaacaacaactggggattccgacccaagagactcaacttcaagctctttaacattcaagtcaaagaggtcacgcagaatgacggtacgacgacgattgccaataaccttaccagcacggttcaggtgtttactgactcggagtaccagctcccgtacgtcctcgggtcggcgcatcaaggatgcctcccgccgtttccagcggacgtcttcatggtcccacagtatggatacctcaccctgaacaacgggagtcaggcggtaggacgctcttccttttactgcctggagtactttccttctcagatgcttcgtactggaaacaactttcagttcagctacacctttgaagacgttcctttccacagcagctacgctcacagccagagtctggatcggctgatgaatcctctgatcgaccagtacctgtattatctgaacaaaacacaatcaaatagtggaactcttcagcagtctcggctactgtttagtcaagctggacccaccagcatgtctcttcaagctaaaaactggctacctggaccttgctacagacagcagcgtctgtcaaagcaggcaaacgacaacaacaacagcaactttccctggactgcggctacaaagtatcacctaaatggccgggactcgttggttaatccaggaccagctatggccagtcacaaagacgatgaagaaaagtttttccccatgcatggaaccctgatatttggtaaacaaggaacaaatgctaacgacgcggatttggacaatgtcatgattacagatgaagaagaaatccgcaccaccaatcccgtggctacggagcagtacggatatgtgtcaaataatttgcaaaactcaaatactggtccaactactggaactgtcaatcaccaaggagcgttacctggcatggtgtggcaggatcgagacgtgtacctgcagggacccatttgggccaagattcctcacaccgatggacactttcatccttctccactgatgggaggttttgggctcaaacacccgcctcctcagatcatgatcaaaaacactcccgttccagccaatcctcccacaaacttcagttctgccaagtttgcttctttcatcacacagtattccacggggcaggtcagcgtggagatcgagtgggagctgcagaaagagaacagcaaacgctggaatcccgaaattcagtacacttccaactacaacaaatctgttaatgtggactttactgtggacactaatggcgtgtattcagagcctcgccccattggcaccagatacctgactcgtaatctgtaa

SEQ ID NO: 347 - DNA, 2211 bp, Adeno-associated virus; identical to SEQ ID NO: 28
  source 1..2211: mol_type = unassigned DNA

SEQ ID NO: 348 - DNA, 2208 bp, Adeno-associated virus
  source 1..2208: mol_type = unassigned DNA
atggctgccgatggttatcttccagattggctcgaggacactctctctgaaggaacaagacagtggtggaagctcaaacctggcccaccaccaccaaagcccgcagagcggcataaggacgacagcaggggtcttgtgcttcctgggtacaagtacctcggacccttcaacggactcgacaagggggagccggtcaacgaggcagacgccgcggccctcgagcacgacaaggcctacgaccggcagctcgacagcggagacaacccgtacctcaagtacaaccacgccgacgcggagtttcaggagcgtcttaaagaagatacgtcttttgggggcaacctcggacgagcagtcttccaggcgaaaaagagggttcttgaacctctgggcctggttgaggaacctgttaagacggctccgggaaaaaagaggccggtagagcactctcctgcggagccagactcctcctcgggaaccggaaaagcgggccagcagcctgcaagaaaaagattgaattttggtcagactggagacgcagactccgtacctgacccccagcctctcggacagccaccagcagccccctctggtttgggatctactacaatggctacaggcagtggcgcaccaatggcagacaataacgagggtgccgatggagtgggtaattcctcaggaaattggcattgcgattcccaatggctgggcgacagagtcatcaccaccagcacccgaacctgggccctgcccacctacaacaaccacctctacaagcaaatctcaagccaatcaggagcctcaaacgacaaccactactttggctacagcaccccttgggggtattttgacttcaacagattccactgccacttttcaccacgtgactggcaaagactcatcaacaacaactggggattccgacccaagagactcaacttcaagctctttaacattcaagtcaaagaggtcacgcagaatgacggtacgacgacgattgccaataaccttaccagcacggttcaggtgtttactgactcggagtaccagctcccgtacgtcctcgggtcggcgcatcaaggatgcctcccgccgtttccagcggacgtcttcatggtcccacagtatggatacctcaccctgaacaacgggagtcaggcggtaggacgctcttccttttactgcctggagtactttccttctcagatgcttcgtactggaaacaactttcagttcagctacacctttgaagacgttcctttccacagcagctacgctcacagccagagtctggatcggctgatgaatcctctgatcgaccagtacctgtattatctgaacaaaacacaatcaaatagtggaactcttcagcagtctcggctactgtttagtcaagctggacccaccagcatgtctcttcaagctaaaaactggctacctggaccttgctacagacagcagcgtctgtcaaagcaggcaaacgacaacaacaacagcaactttccctggactgcggctacaaagtaccacctaaatggccgggactcgttggttaatccaggaccagctatggccagtcacaaagacgatgaagaaaagtttttccccatgcatggaaccctgatatttggtaaacaaggaacaaatgctaacgacgcggatttggacaatgtcatgattacagatgaagaagaaatccgcaccaccaatcccgtggctacggagcagtacggatatgtgtcaaataatttgcaaaactcaaatactggtccaactactggaactgtcaatcaccaaggagcgttacctggcatggtgtggcaggatcgagacgtgtacctgcagggacccatttgggccaagattcctcacaccgatggacactttcatccttctccactgatgggaggttttgggctcaaacacccgcctcctcagatcatgatcaaaaacactcccgttccagccaatcctcccacaaacttcagttctgccaagtttgcttctttcatcacacagtattccacggggcaggtcagcgtggagatcgagtgggagctgcagaaagagaacagcaaacgctggaatcccgaaattcagtacacttccaactacaacaaatctgttaatgtggactttactgtggacactaatggcgtgtattcagagcctcgccccattggcaccagatacctgactcgtaatctgtaa

SEQ ID NO: 349 - DNA, 2217 bp, Adeno-associated virus
  source 1..2217: mol_type = unassigned DNA
atggctgctgacggttatcttccagattggctcgaggacaacctctctgagggcattcgcgagtggtgggacctgaaacctggagcccccaagcccaaggccaaccagcagaagcaggacgacggccggggtctggtgcttcctggctacaagtacctcggacccttcaacggactcgacaagggggagcccgtcaacgcggcggacgcagcggccctcgagcacgacaaggcctacgaccagcagctcaaagcgggtgacaatccgtacctgcggtataaccacgccgacgccgagtttcaggagcgtctgcaagaagatacgtcttttgggggcaacctcgggcgagcagtcttccaggccaagaagcgggttctcgaacctctcggtctggttgaggaagctgctaagacggctcctggaaagaagagaccggtagaaccgtcacctcagcgttcccccgactcctccacgggcatcggcaagaaaggccagcagcccgctaaaaagagactgaactttggtcagactggcgactcagagtcagtccccgaccctcaaccaatcggagaaccacctgcaggcccctctggtctgggatctggtacaatggctgcaggcggtggcgctccaatggcagacaataacgaaggcgccgacggagtgggtagttcctcaggaaattggcattgcgattccacatggctgggcgacagagtcatcaccaccagcacccgaacctgggccctgcccacctacaacaaccacctctacaagcaaatatccaatgggacatcgggagggagcaccaacgacaacacctacttcggctacagcaccccctgggggtattttgacttcaacagattccactgccacttctcaccacgtgactggcagcgactcatcaacaacaactggggattccggccaaaaagactcagcttcaagctcttcaacatccaggtcaaggaggtcacgcagaatgaaggcaccaagaccatcgccaataaccttaccagcacgattcaggtatttacggactcggaataccagctgccgtacgtcctcggctccgcgcaccagggctgcctgcctccgttcccggcggacgtcttcatgattccccagtacggctaccttacactgaacaatggaagtcaagccgtaggccgttcctccttctactgcctggaatattttccatctcaaatgctgcgaactggaaacaattttgaattcagctacaccttcgaggacgtgcctttccacagcagctacgcacacagccagagcttggaccgactgatgaatcctctcatcgaccagtacctgtactacttatccagaactcagtccacaggaggaactcaaggtacccagcaattgttattttctcaagctgggcctgcaaacatgtcggctcaggctaagaactggctacctggaccttgctaccggcagcagcgagtctctacgacactgtcgcaaaacaacaacagcaactttgcttggactggtgccaccaaatatcacctgaacggaagagactctttggtaaatcccggtgtcgccatggcaacccacaaggacgacgaggaacgcttcttcccgtcgagtggagtcctgatgtttggaaaacagggtgctggaagagacaatgtggactacagcagcgttatgctaaccagcgaagaagaaattaaaaccactaaccctgtagccacagaacaatacggtgtggtggctgacaacttgcagcaaaccaatacagggcctattgtgggaaatgtcaacagccaaggagccttacctggcatggtctggcagaaccgagacgtgtacctgcagggtcccatctgggccaagattcctcacacggacggcaactgccacccttcaccgctaatgggaggatttggactgaagcacccacctcctcagatcctgatcaagaacacgccggtacctgcggatcctccaacaacgttcagccaggcgaaattggcttccttcattacgcagtacagcaccggacaggtcagcgtggaaatcgagtgggagctgcagaaggagaacagcaaacgctggaacccagagattcagtacacttcaaactactacaaatctacaaatgtggactttgctgtcaatacagagggaacttattctgagcctcgccccattggtactcgttacctcacccgtaatctgtaa

SEQ ID NO: 350 - protein, 735 aa, Adeno-associated virus
MAADGYLPDWLEDTLSEGTRQWWKLKPGPPPPKPAERHKDDSRGLVLPGYKYLGPFNGLDKGEPVNEADAAALEHDKAYDRQLDSGDNPYLKYNHADAEFQERLKEDTSFGGNLGRAVFQAKKRVLEPLGLVEEPVKTAPGKKRPVEHSPAEPDSSSGTGKAGQQPARKRLNFGQTGDADSVPDPQPLGQPPAAPSGLGSTTMATGSGAPMADNNEGADGVGNSSGNWHCDSQWLGDRVITTSTRTWALPTYNNHLYKQISSQSGASNDNHYFGYSTPWGYFDFNRFHCHFSPRDWQRLINNNWGFRPKRLNFKLFNIQVKEVTQNDGTTTIANNLTSTVQVFTDSEYQLPYVLGSAHQGCLPPFPADVFMVPQYGYLTLNNGSQAVGRSSFYCLEYFPSQMLRTGNNFQFSYTFEDVPFHSSYAHSQSLDRLMNPLIDQYLYYLNKTQSNSGTLQQSRLLFSQAGPTSMSLQAKNWLPGPCYRQQRLSKQANDNNNSNFPWTAATKYHLNGRDSLVNPGPAMASHKDDEEKFFPMHGTLIFGKQGTNANDADLDNVMITDEEEIRTTNPVATEQYGYVSNNLQNSNTGPTTGTVNHQGALPGMVWQDRDVYLQGPIWAKIPHTDGHFHPSPLMGGFGLKHPPPQIMIKNTPVPANPPTNFSSAKFASFITQYSTGQVSVEIEWELQKENSKRWNPEIQYTSNYNKSVNVDFTVDTNGVYSEPRPIGTRYLTRNL

SEQ ID NO: 351 - DNA, 2208 bp, Adeno-associated virus
  source 1..2208: mol_type = unassigned DNA
atggctgccgatggttatcttccagattggctcgaggacactctctctgaaggaataagacagtggtggaagctcaaacctggcccaccaccaccaaagcccgcagagcggcatcaggacaacagcaggggtcttgtgcttcctgggtacaagtacctcggaccctccaacggactcgacaaaggagagccggtcaacgaggcagacgccgcggccctcgagcacgacaaggcctacgaccggcagctcgacagcggagacaacccgtacctcaagtacaaccacgccgacgcggagtttcaggagcgtcttaaagaagatacgtcttttgggggcaacctcggacgagcagtcttccaggcgaaaaagagggttcttgaacctctgggcctggttgaggaacctgttaagacggctccgggaaaaaagaggccggtagagcactctcctgtggagccagactcctcctcgggaaccggaaaagcgggccatcagcctgcgagaaagagattgaattttggtcagactggagacgcagactccgtacctgacccccagcctctcggacagccaccagcagcccccacaagtttgggatctactacaatggctacaggcagtggcgcaccaatggcagacaataacgagggtgccgatggagtgggtaattcctcaggaaattggcattgcgattcccaatggctgggcgacagagtcatcaccaccagcacccgaacctgggccctgcccacctacaacaaccacctctacaagcaaatctccagccaatcaggagcctcgaacgacaaccactactttggctgcagcaccccctgggggtattttgacttcaacagattccactgtcacttctccccacgtgattggcaaagactcatcaacaacaactggggattccgacccaagagactcaacttcaagctctttaacattcaagtcaaagaggtcacgcagaatgacggtacgacgacgattgccaataaccttaccagcacggttcaggtgtttactgactcggagtacccgctcccgtacgtcctcggctcggcgcatcaaggatgcctcccgccgtttccagcggacgtcttcatggtcccacagtatggatacctcaccctgaacaacgggagtcaggcggtaggacgctcttccttttactgcctggagtactttccttctcagatgctgcgtaccggaaacaactttaccttcagctacacctttgaggacgttcctttccacagcagctacgctcacagccagagtttggaccggctgatgaatcctctgatcgaccagtatctatattatctgaacaggacacaatcaaatagtggaactcttcagcagtctaggctactgtttagccaagctggacccaccagcatgtctcttcaagctaaaaactggctgcctggaccttgctacagacagcagcgtctttcaaagcaggcaaacgacaacaacaacagcaactttccctggactgcggctacaaagtatcatctaaatggccgggactcgttggttaatccaggaccagctatggccagccacaaagacgatgaagaaaagtttttccccatgcatggaaccctgatatttggtaaacaaggaacaaatgctaacgacgcggatttggagcatgttatgattacagatgaagaagaaatcaggaccaccaatcctgtggctacagagcagtacggaaacgtgtcaaataatttgcaaaactcaaatactggtccaactacagaaaatgtcaatcaccagggagcgttacctggtatggtgtggcaggatcgagacgtgtacctgcagggacccatttgggccaagattcctcacaccgacggacactttcacccttctccactgatgggaggttttggactcaaacacccgcctcctcaaatcatgatcaaaaacactcccgttccagccaatcctcccacaaacttcagttctgccaagtttgcttctttcatcacacagtattccacgggccaggtcagcgtggagattgagtgggagctgcagaaggagaacagcaaacgctggaaccccgagatccagtatacttccaactacaacaaatctgttaatgtggactttactgtggacactaatggtgtgtattcagagccttgccccattggcaccagatacctgactcgtaatctgtaa

SEQ ID NO: 352 - protein, 735 aa, Adeno-associated virus
MAADGYLPDWLEDTLSEGIRQWWKLKPGPPPPKPAERHQDNSRGLVLPGYKYLGPSNGLDKGEPVNEADAAALEHDKAYDRQLDSGDNPYLKYNHADAEFQERLKEDTSFGGNLGRAVFQAKKRVLEPLGLVEEPVKTAPGKKRPVEHSPVEPDSSSGTGKAGHQPARKRLNFGQTGDADSVPDPQPLGQPPAAPTSLGSTTMATGSGAPMADNNEGADGVGNSSGNWHCDSQWLGDRVITTSTRTWALPTYNNHLYKQISSQSGASNDNHYFGCSTPWGYFDFNRFHCHFSPRDWQRLINNNWGFRPKRLNFKLFNIQVKEVTQNDGTTTIANNLTSTVQVFTDSEYPLPYVLGSAHQGCLPPFPADVFMVPQYGYLTLNNGSQAVGRSSFYCLEYFPSQMLRTGNNFTFSYTFEDVPFHSSYAHSQSLDRLMNPLIDQYLYYLNRTQSNSGTLQQSRLLFSQAGPTSMSLQAKNWLPGPCYRQQRLSKQANDNNNSNFPWTAATKYHLNGRDSLVNPGPAMASHKDDEEKFFPMHGTLIFGKQGTNANDADLEHVMITDEEEIRTTNPVATEQYGNVSNNLQNSNTGPTTENVNHQGALPGMVWQDRDVYLQGPIWAKIPHTDGHFHPSPLMGGFGLKHPPPQIMIKNTPVPANPPTNFSSAKFASFITQYSTGQVSVEIEWELQKENSKRWNPEIQYTSNYNKSVNVDFTVDTNGVYSEPCPIGTRYLTRNL

SEQ ID NO: 353 - DNA, 2214 bp, synthetic construct
  misc_feature 1..2214: note = Description of Artificial Sequence: Synthetic polynucleotide
  source 1..2214: mol_type = other DNA
atggctgccgatggttatcttccagattggctcgaggacaaccttagtgaaggaattcgcgagtggtgggctttgaaacctggagcccctcaacccaaggcaaatcaacaacatcaagacaacgctcgaggtcttgtgcttccgggttacaaataccttggacccggcaacggactcgacaagggggagccggtcaacgcagcagacgcggcggccctcgagcacgacaaggcctacgaccagcagctgcaggcgggtgacaatccgtacctgcggtataaccacgccgacgccgagtttcaggagcgtctgcaagaagatacgtcttttgggggcaaccttggcagagcagtcttccaggccaaaaagaggatccttgagcctcttggtctggttgaggaagcagctaaaacggctcctggaaagaagaggcctgtagatcagtctcctcaggaaccggactcatcatctggtgttggcaaatcgggcaaacagcctgccagaaaaagactaaatttcggtcagactggcgactcagagtcagtcccagaccctcaacctctcggagaaccaccagcagcccccacaagtttgggatctaatacaatggcttcaggcggtggcgcaccaatggcagacaataacgagggtgccgatggggtgggtagttcctcgggaaattggcattgcgattcccaatggctgggggacagagtcatcaccaccagcacccgaacctgggccctgcccacctacaacaatcacctctacaagcaaatctccaacgggacatcgggaggagccaccaacgacaacacctacttcggctacagcaccccctgggggtattttgactttaacagattccactgccacttttcaccacgtgactggcagcgactcatcaacaacaactggggattccggcccaagagactcagcttcaagctcttcaacatccaggtcaaggaggtcacgcagaatgaaggcaccaagaccatcgccaataacctcaccagcaccatccaggtgtttacggactcggagtaccagctgccgtacgttctcggctctgcgcaccagggctgcctccctccgttcccggcggacgtgttcatgattccgcaatacggctacctgacgctcaacaatggcagccaagccgtgggacgttcatccttttactgcctggaatatttcccttctcagatgctgagaacgggcaacaactttaccttcagctacacctttgaggaagtgcctttccacagcagctacgcgcacagccagagcttggaccggctgatgaatcctctgattgaccagtacctgtactacttgtctcggactcaaacaacaggaggcacggcaaatacgcagactctgggcttcagccaaggtgggcctaatacaatggccaatcaggcaaagaactggctgccaggaccctgttaccgccaacaacgcgtctcaacgacaaccgggcaaaacaacaatagcaactttgcctggactgctgggaccaaataccatctgaatggaagaaattcattggctaatcctggcatcgctatggcaacacacaaagacgacgaggagcgtttttttcccagtaacgggatcctgatttttggcaaacaaaatgctgccagagacaatgcggattacagcgatgtcatgctcaccagcgaggaagaaatcaaaaccactaaccctgtggctacagaggaatacggtatcgtggcagataacttgcagcagcaaaacacggctcctcaaattggaactgtcaacagccagggggccttacccggtatggtctggcagaaccgggacgtgtacctgcagggtcccatctgggccaagattcctcacacggacggcaacttccacccgtctccgctgatgggcggctttggcctgaaacatcctccgcctcagatcctgatcaagaacacgcctgtacctgcggatcctccgaccaccttcaaccagtcaaagctgaactctttcatcacgcaatacagcaccggacaggtcagcgtggagatcgagtgggagctgcagaaggaaaacagcaagcgctggaacccggagatccagtacacttccaactattacaagtctaataatgttgaatttgctgttaatactgaaggtgtatatagtgaaccccgccccattggcaccagatacctgactcgtaatctgtaa

SEQ ID NO: 354 - protein, 737 aa, synthetic construct
  REGION 1..737: note = Description of Artificial Sequence: Synthetic polypeptide
MAADGYLPDWLEDNLSEGIREWWALKPGAPQPKANQQHQDNARGLVLPGYKYLGPGNGLDKGEPVNAADAAALEHDKAYDQQLQAGDNPYLRYNHADAEFQERLQEDTSFGGNLGRAVFQAKKRILEPLGLVEEAAKTAPGKKRPVDQSPQEPDSSSGVGKSGKQPARKRLNFGQTGDSESVPDPQPLGEPPAAPTSLGSNTMASGGGAPMADNNEGADGVGSSSGNWHCDSQWLGDRVITTSTRTWALPTYNNHLYKQISNGTSGGATNDNTYFGYSTPWGYFDFNRFHCHFSPRDWQRLINNNWGFRPKRLSFKLFNIQVKEVTQNEGTKTIANNLTSTIQVFTDSEYQLPYVLGSAHQGCLPPFPADVFMIPQYGYLTLNNGSQAVGRSSFYCLEYFPSQMLRTGNNFTFSYTFEEVPFHSSYAHSQSLDRLMNPLIDQYLYYLSRTQTTGGTANTQTLGFSQGGPNTMANQAKNWLPGPCYRQQRVSTTTGQNNNSNFAWTAGTKYHLNGRNSLANPGIAMATHKDDEERFFPSNGILIFGKQNAARDNADYSDVMLTSEEEIKTTNPVATEEYGIVADNLQQQNTAPQIGTVNSQGALPGMVWQNRDVYLQGPIWAKIPHTDGNFHPSPLMGGFGLKHPPPQILIKNTPVPADPPTTFNQSKLNSFITQYSTGQVSVEIEWELQKENSKRWNPEIQYTSNYYKSNNVEFAVNTEGVYSEPRPIGTRYLTRNL

SEQ ID NO: 355 - DNA, 2211 bp, synthetic construct
  misc_feature 1..2211: note = Description of Artificial Sequence: Synthetic polynucleotide
  source 1..2211: mol_type = other DNA
atggctgccgatggttatcttccagattggctcgaggacaacctctctgagggcattcgcgagtggtgggacttgaaacctggagccccgaagcccaaagccaaccagcaaaagcaggacgacggccggggtctggtgcttcctggctacaagtacctcggacccttcaacggactcgacaagggggagcccgtcaacgcggcggacgcagcggccctcgagcacgacaaggcctacgaccagcagctcaaagcgggtgacaatccgtacctgcggtataaccacgccgacgccgagtttcaggagcgtctgcaagaagatacgtcttttgggggcaacctcgggcgagcagtcttccaggccaagaagcgggttctcgaacctctcggtctggttgaggaaggcgctaagacggctcctggaaagaaacgtccggtagagcagtcgccacaagagccagactcctcctcgggcatcggcaagacaggccagcagcccgctaaaaagagactcaattttggtcagactggcgactcagagtcagtccccgacccacaacctctcggagaacctccagcaacccccgctgctgtgggacctactacaatggcttcaggcggtggcgcaccaatggcagacaataacgaaggcgccgacggagtgggtaatgcctcaggaaattggcattgcgattccacatggctgggcgacagagtcatcaccaccagcacccgaacatgggccttgcccacctataacaaccacctctacaagcaaatctccagtgcttcaacgggggccagcaacgacaaccactacttcggctacagcaccccctgggggtattttgatttcaacagattccactgccatttctcaccacgtgactggcagcgactcatcaacaacaattggggattccggcccaagagactcaacttcaagctcttcaacatccaagtcaaggaggtcacgacgaatgatggcgtcacgaccatcgctaataaccttaccagcacggttcaagtcttctcggactcggagtaccagctgccgtacgttctcggctctgcccaccagggctgcctgcctccgttcccggcggacgtgttcatgattccccagtacggctacctaacactcaacaacggtagtcaggccgtgggacgctcctccttctactgcctggaatactttccttcgcagatgctgagaaccggcaacaacttccagtttacttacaccttcgaggacgtgcctttccacagcagctacgcccacagccagagcttggaccggctgatgaatcctctgattgaccagtacctgtactacttgtctcggactcaaacaacaggaggcacggcaaatacgcagactctgggcttcagccaaggtgggcctaatacaatggccaatcaggcaaagaactggctgccaggaccctgttaccgccaacaacgcgtctcaacgacaaccgggcaaaacaacaatagcaattttacctggactggtgcttcaaaatataacctcaatgggcgtgaatccatcatcaaccctggcactgctatggcctcacacaaagacgacgaagacaagttctttcccatgagcggtgtcatgatttttggaaaagagagcgccggagcttcaaacactgcattggacaatgtcatgattacagacgaagaggaaattaaagccactaaccctgtggccaccgaaagatttgggaccgtggcagtcaatttccagagcagcagcacagaccctgcgaccggagatgtgcatgctatgggagcattacctggcatggtgtggcaagatagagacgtgtacctgcagggtcccatttgggccaaaattcctcacacagatggacactttcacccgtctcctcttatgggcggctttggactcaagaacccgcctcctcagatcctcatcaaaaacacgcctgttcctgcgaatcctccggcggagttttcagctacaaagtttgcttcattcatcacccaatactccacaggacaagtgagtgtggaaattgaatgggagctgcagaaagaaaacagcaagcgctggaatcccgaagtgcagtacacatccaattatgcaaaatctgccaacgttgattttactgtggacaacaatggactttatactgagcctcgccccattggcacccgttacctcacccgtcccctgtaa

SEQ ID NO: 356 - protein, 736 aa, synthetic construct
  REGION 1..736: note = Description of Artificial Sequence: Synthetic polypeptide
MAADGYLPDWLEDNLSEGIREWWDLKPGAPKPKANQQKQDDGRGLVLPGYKYLGPFNGLDKGEPVNAADAAALEHDKAYDQQLKAGDNPYLRYNHADAEFQERLQEDTSFGGNLGRAVFQAKKRVLEPLGLVEEGAKTAPGKKRPVEQSPQEPDSSSGIGKTGQQPAKKRLNFGQTGDSESVPDPQPLGEPPATPAAVGPTTMASGGGAPMADNNEGADGVGNASGNWHCDSTWLGDRVITTSTRTWALPTYNNHLYKQISSASTGASNDNHYFGYSTPWGYFDFNRFHCHFSPRDWQRLINNNWGFRPKRLNFKLFNIQVKEVTTNDGVTTIANNLTSTVQVFSDSEYQLPYVLGSAHQGCLPPFPADVFMIPQYGYLTLNNGSQAVGRSSFYCLEYFPSQMLRTGNNFQFTYTFEDVPFHSSYAHSQSLDRLMNPLIDQYLYYLSRTQTTGGTANTQTLGFSQGGPNTMANQAKNWLPGPCYRQQRVSTTTGQNNNSNFTWTGASKYNLNGRESIINPGTAMASHKDDEDKFFPMSGVMIFGKESAGASNTALDNVMITDEEEIKATNPVATERFGTVAVNFQSSSTDPATGDVHAMGALPGMVWQDRDVYLQGPIWAKIPHTDGHFHPSPLMGGFGLKNPPPQILIKNTPVPANPPAEFSATKFASFITQYSTGQVSVEIEWELQKENSKRWNPEVQYTSNYAKSANVDFTVDNNGLYTEPRPIGTRYLTRPL

SEQ ID NO: 357 - DNA, 2211 bp, synthetic construct
  misc_feature 1..2211: note = Description of Artificial Sequence: Synthetic polynucleotide
  source 1..2211: mol_type = other DNA
atggctgctgacggttatcttccagattggctcgaggacaacctttctgaaggcattcgagagtggtgggcgctgcaacctggagcccctaaacccaaggcaaatcaacaacatcaggacaacgctcggggtcttgtgcttccgggttacaaatacctcggacccggcaacggactcgacaagggggaacccgtcaacgcagcggacgcggcagccctcgagcacgacaaggcctacgaccagcagctcaaggccggtgacaacccctacctcaagtacaaccacgccgacgccgagttccaggagcggctcaaagaagatacgtcttttgggggcaacctcgggcgagcagtcttccaggccaaaaagaggcttcttgaacctcttggtctggttgaggaagcggctaagacggctcctggaaagaagaggcctgtagatcagtctcctcaggaaccggactcatcatctggtgttggcaaatcgggcaaacagcctgccagaaaaagactaaatttcggtcagactggcgactcagagtcagtcccagaccctcaacctctcggagaaccaccagcagcccccacaagtttgggatctaatacaatggcttcaggcggtggcgcaccaatggcagacaataacgagggtgccgatggagtgggtaattcctcaggaaattggcattgcgattcccaatggctgggcgacagagtcatcaccaccagcaccagaacctgggccctgcccacttacaacaaccatctctacaagcaaatctccagccaatcaggagcttcaaacgacaaccactactttggctacagcaccccttgggggtattttgactttaacagattccactgccacttctcaccacgtgactggcagcgactcattaacaacaactggggattccggcccaagaaactcagcttcaagctcttcaacatccaagttaaagaggtcacgcagaacgatggcacgacgactattgccaataaccttaccagcacggttcaagtgtttacggactcggagtatcagctcccgtacgtgctcgggtcggcgcaccaaggctgtctcccgccgtttccagcggacgtcttcatggtccctcagtatggatacctcaccctgaacaacggaagtcaagcggtgggacgctcatccttttactgcctggagtacttcccttcgcagatgctaaggactggaaataacttccaattcagctataccttcgaggatgtaccttttcacagcagctacgctcacagccagagtttggatcgcttgatgaatcctcttattgatcagtatctgtactacctgaacagaacgcaaggaacaacctctggaacaaccaaccaatcacggctgctttttagccaggctgggcctcagtctatgtctttgcaggccagaaattggctacctgggccctgctaccggcaacagagactttcaaagactgctaacgacaacaacaacagtaactttccttggacagcggccagcaaatatcatctcaatggccgcgactcgctggtgaatccaggaccagctatggccagtcacaaggacgatgaagaaaaatttttccctatgcacggcaatctaatatttggcaaagaagggacaacggcaagtaacgcagaattagataatgtaatgattacggatgaagaagagattcgtaccaccaatcctgtggcaacagagcagtatggaactgtggcaaataacttgcagagctcaaatacagctcccacgactagaactgtcaatgatcagggggccttacctggcatggtgtggcaagatcgtgacgtgtaccttcaaggacctatctgggcaaagattcctcacacggatggacactttcatccttctcctctgatgggaggctttggactgaaacatccgcctcctcaaatcatgatcaaaaatactccggtaccggcaaatcctccgacgactttcagcccggccaagtttgcttcatttatcactcagtactccactggacaggtcagcgtggaaattgagtgggagctacagaaagaaaacagcaaacgttggaatccagagattcagtacacttccaactacaacaagtctgttaatgtggactttactgtagacactaatggtgtttatagtgaacctcgccccattggcacccgttaccttacccgtcccctgtaa

SEQ ID NO: 358 - protein, 736 aa, synthetic construct
  REGION 1..736: note = Description of Artificial Sequence: Synthetic polypeptide
MAADGYLPDWLEDNLSEGIREWWALQPGAPKPKANQQHQDNARGLVLPGYKYLGPGNGLDKGEPVNAADAAALEHDKAYDQQLKAGDNPYLKYNHADAEFQERLKEDTSFGGNLGRAVFQAKKRLLEPLGLVEEAAKTAPGKKRPVDQSPQEPDSSSGVGKSGKQPARKRLNFGQTGDSESVPDPQPLGEPPAAPTSLGSNTMASGGGAPMADNNEGADGVGNSSGNWHCDSQWLGDRVITTSTRTWALPTYNNHLYKQISSQSGASNDNHYFGYSTPWGYFDFNRFHCHFSPRDWQRLINNNWGFRPKKLSFKLFNIQVKEVTQNDGTTTIANNLTSTVQVFTDSEYQLPYVLGSAHQGCLPPFPADVFMVPQYGYLTLNNGSQAVGRSSFYCLEYFPSQMLRTGNNFQFSYTFEDVPFHSSYAHSQSLDRLMNPLIDQYLYYLNRTQGTTSGTTNQSRLLFSQAGPQSMSLQARNWLPGPCYRQQRLSKTANDNNNSNFPWTAASKYHLNGRDSLVNPGPAMASHKDDEEKFFPMHGNLIFGKEGTTASNAELDNVMITDEEEIRTTNPVATEQYGTVANNLQSSNTAPTTRTVNDQGALPGMVWQDRDVYLQGPIWAKIPHTDGHFHPSPLMGGFGLKHPPPQIMIKNTPVPANPPTTFSPAKFASFITQYSTGQVSVEIEWELQKENSKRWNPEIQYTSNYNKSVNVDFTVDTNGVYSEPRPIGTRYLTRPL

SEQ ID NO: 359 - DNA, 2211 bp, synthetic construct
  misc_feature 1..2211: note = Description of Artificial Sequence: Synthetic polynucleotide
  source 1..2211: mol_type = other DNA
atggctgccgatggttatcttccagattggctcgaggacaaccttagtgaaggaattcgcgagtggtgggctttgaaacctggagcccctcaacccaaggcaaatcaacaacatcaagacaacgctcgaggtcttgtgcttccgggttacaaataccttggacccggcaacggactcgacaagggggagccggtcaacgcagcagacgcggcggccctcgagcacgacaaggcctacgaccagcagctcaaggccggagacaacccgtacctcaagtacaaccacgccgacgccgagttccaggagcggctcaaagaagatacgtcttttgggggcaacctcgggcgagcagtcttccaggccaaaaagaggcttcttgaacctcttggtctggttgaggaagcggctaagacggctcctggaaagaagagaccggtagagccatcaccccagcgttctccagactcctctacgggcatcggcaagaaaggccaacagcccgctaaaaagagactcaattttggtcagactggcgactcagagtcagtccccgacccacaacctctcggagaacctccagcaacccccgctgctgtgggacctactacaatggcttcaggcggtggcgcaccaatggcagacaataacgagggtgccgatggagtgggtaattcctcaggaaattggcattgcgattcccaatggctgggcgacagagtcatcaccaccagcaccagaacctgggccctgcccacttacaacaaccatctctacaagcaaatctccagccaatcaggagcttcaaacgacaaccactactttggctacagcaccccttgggggtattttgactttaacagattccactgccacttttcaccacgtgactggcaaagactcatcaacaacaactggggattccgacccaagagactcaacttcaagctcttcaacatccaagtcaaggaggtcacgacgaatgatggcgtcacgaccatcgctaataaccttaccagcacggttcaagtcttctcggactcggagtaccagttgccgtacgtcctcggctctgcgcaccagggctgcctccctccgttcccggcggacgtgttcatgattccgcagtacggctacctaacgctcaacaatggcagccaagccgtgggacgttcatccttttactgcctggaatatttcccttctcagatgctgagaacgggcaacaactttaccttcagctacacttttgaggacgttcctttccacagcagctacgctcacagccagagtctggaccgtctcatgaatcctctcatcgaccagtacctgtattacttgagcagaacaaacactccaagtggaaccaccacgcagtcaaggcttcagttttctcaggccggagcgagtgacattcgggaccagtctaggaactggcttcctggaccctgttaccgccagcagcgcgtttctaaaacaaaaacagacaacaacaacagcaattttacctggactggtgcttcaaaatataaccttaatgggcgtgaatctataatcaaccctggcactgctatggcctcacacaaagacgacgaagacaagttctttcccatgagcggtgtcatgatttttggaaaagagagcgccggagcttcaaacactgcattggacaatgtcatgattacagacgaagaggaaattaaagccactaaccctgtggccaccgaaagatttgggaccgtggcagtcaatttccagagcagcagcacagaccctgcgaccggagatgtgcatgttatgggagccttacctggaatggtgtggcaagacagagacgtatacctgcagggtcctatttgggccaaaattcctcacacggatggacactttcacccgtctcctcttatgggcggctttggactcaagaacccgcctcctcagatcctcatcaaaaacacgcctgttcctgcgaatcctccggcggagttttcagctacaaagtttgcttcattcatcacccaatactccacaggacaagtgagtgtggaaattgaatgggagctgcagaaagaaaacagcaagcgctggaatcccgaagtgcagtacacatccaattatgcaaaatctgccaacgttgattttactgtggacaacaatggactttatactgagcctcgccccattggcacccgttaccttacccgtcccctgtaa

SEQ ID NO: 360 - protein, 736 aa, synthetic construct
  REGION 1..736: note = Description of Artificial Sequence: Synthetic polypeptide
MAADGYLPDWLEDNLSEGIREWWALKPGAPQPKANQQHQDNARGLVLPGYKYLGPGNGLDKGEPVNAADAAALEHDKAYDQQLKAGDNPYLKYNHADAEFQERLKEDTSFGGNLGRAVFQAKKRLLEPLGLVEEAAKTAPGKKRPVEPSPQRSPDSSTGIGKKGQQPAKKRLNFGQTGDSESVPDPQPLGEPPATPAAVGPTTMASGGGAPMADNNEGADGVGNSSGNWHCDSQWLGDRVITTSTRTWALPTYNNHLYKQISSQSGASNDNHYFGYSTPWGYFDFNRFHCHFSPRDWQRLINNNWGFRPKRLNFKLFNIQVKEVTTNDGVTTIANNLTSTVQVFSDSEYQLPYVLGSAHQGCLPPFPADVFMIPQYGYLTLNNGSQAVGRSSFYCLEYFPSQMLRTGNNFTFSYTFEDVPFHSSYAHSQSLDRLMNPLIDQYLYYLSRTNTPSGTTTQSRLQFSQAGASDIRDQSRNWLPGPCYRQQRVSKTKTDNNNSNFTWTGASKYNLNGRESIINPGTAMASHKDDEDKFFPMSGVMIFGKESAGASNTALDNVMITDEEEIKATNPVATERFGTVAVNFQSSSTDPATGDVHVMGALPGMVWQDRDVYLQGPIWAKIPHTDGHFHPSPLMGGFGLKNPPPQILIKNTPVPANPPAEFSATKFASFITQYSTGQVSVEIEWELQKENSKRWNPEVQYTSNYAKSANVDFTVDNNGLYTEPRPIGTRYLTRPL

SEQ ID NO: 361 - DNA, 2211 bp, synthetic construct
  misc_feature 1..2211: note = Description of Artificial Sequence: Synthetic polynucleotide
  source 1..2211: mol_type = other DNA
atggctgccgatggttatcttccagattggctcgaggacaacctctctgagggcattcgcgagtggtgggacttgaaacctggagcccctaaacccaaggcaaatcaacaacatcaggacaacgctcgaggtcttgtgcttccgggttacaaataccttggacccggcaacggactcgacaagggggagccggtcaacgcagcagacgcggcggccctcgagcacgacaaggcctacgaccagcagctcaaggccggagacaacccgtacctcaagtacaaccacgccgacgccgagttccaggagcggctcaaagaagatacgtcttttgggggcaacctcgggcgagcagtcttccaggccaaaaagaggcttcttgaacctcttggtctggttgaggaagcggctaagacggctcctggaaagaagagaccggtagagccatcaccccagcgttctccagactcctctacgggcatcggcaagaaaggccaacagcccgctaaaaagagactcaattttggtcagactggcgactcagagtcagtccccgacccacaacctctcggagaacctccagcaacccccgctgctgtgggacctactacaatggcttcaggcggtggcgcaccaatggcagacaataacgagggtgccgatggagtgggtaattcctcaggaaattggcattgcgattcccaatggctgggcgacagagtcatcaccaccagcaccagaacctgggccctgcccacttacaacaaccatctctacaagcaaatctccagccaatcaggagcttcaaacgacaaccactactttggctacagcaccccttgggggtattttgactttaacagattccactgccacttttcaccacgtgactggcaaagactcatcaacaacaactggggattccgacccaagagactcaacttcaagctcttcaacatccaagtcaaggaggtcacgacgaatgatggcgtcacgaccatcgctaataaccttaccagcacggttcaagtcttctcggactcggagtaccagttgccgtacgtcctcggctctgcgcaccagggctgcctccctccgttcccggcggacgtgttcatgattccgcagtacggctacctaacgctcaacaatggcagccaagccgtgggacgttcatccttttactgcctggaatatttcccttctcagatgctgagaacgggcaacaactttaccttcagctacacttttgaggacgttcctttccacagcagctacgctcacagccagagtctggaccgtctcatgaatcccctcatcgaccagtacctgtattacttgagcagaacaaacactccaagtggaaccaccacgcagtcaaggcttcagttttctcaggccggagcgagtgacattcgggaccagtctaggaactggcttcctggaccctgttaccggcagcagcgcgtttctaaaacaaaaacagacaacaacaacagcaactttacctggactggtgcttcaaaatataaccttaatgggcgtgaatctataatcaaccctggcactgctatggcctcacacaaagacgacgaagacaagttctttcccatgagcggtgtcatgatttttggaaaggagagcgccggagcttcaaacactgcattggacaatgtcatgatcacagacgaagaggaaatcaaagccactaaccccgtggccaccgaaagatttgggactgtggcagtcaatctccagagcagcagcacagaccctgcgaccggagatgtgcatgttatgggagccttacctggaatggtgtggcaagacagagacgtgtacctgcagggtcctatttgggccaaaattcctcacacggatggacactttcacccgtctcctctcatgggcggctttggacttaagcacccgcctcctcagatcctcatcaaaaacacgcctgttcctgcgaatcctccggcagagttttcggctacaaagtttgcttcattcatcacccagtattccacaggacaagtgagtgtggaaattgaatgggagctgcagaaagaaaacagcaagcgctggaatcccgaagtgcagtacacatccaattatgcaaaatctgccaacgttgattttactgtggacaacaatggactttatactgagcctcgccccattggcacccgttacctcacccgtcccctgtaa

SEQ ID NO: 362 - protein, 736 aa, synthetic construct
  REGION 1..736: note = Description of Artificial Sequence: Synthetic polypeptide
MAADGYLPDWLEDNLSEGIREWWDLKPGAPKPKANQQHQDNARGLVLPGYKYLGPGNGLDKGEPVNAADAAALEHDKAYDQQLKAGDNPYLKYNHADAEFQERLKEDTSFGGNLGRAVFQAKKRLLEPLGLVEEAAKTAPGKKRPVEPSPQRSPDSSTGIGKKGQQPAKKRLNFGQTGDSESVPDPQPLGEPPATPAAVGPTTMASGGGAPMADNNEGADGVGNSSGNWHCDSQWLGDRVITTSTRTWALPTYNNHLYKQISSQSGASNDNHYFGYSTPWGYFDFNRFHCHFSPRDWQRLINNNWGFRPKRLNFKLFNIQVKEVTTNDGVTTIANNLTSTVQVFSDSEYQLPYVLGSAHQGCLPPFPADVFMIPQYGYLTLNNGSQAVGRSSFYCLEYFPSQMLRTGNNFTFSYTFEDVPFHSSYAHSQSLDRLMNPLIDQYLYYLSRTNTPSGTTTQSRLQFSQAGASDIRDQSRNWLPGPCYRQQRVSKTKTDNNNSNFTWTGASKYNLNGRESIINPGTAMASHKDDEDKFFPMSGVMIFGKESAGASNTALDNVMITDEEEIKATNPVATERFGTVAVNLQSSSTDPATGDVHVMGALPGMVWQDRDVYLQGPIWAKIPHTDGHFHPSPLMGGFGLKHPPPQILIKNTPVPANPPAEFSATKFASFITQYSTGQVSVEIEWELQKENSKRWNPEVQYTSNYAKSANVDFTVDNNGLYTEPRPIGTRYLTRPL

SEQ ID NO: 363 - DNA, 2214 bp, synthetic construct
  misc_feature 1..2214: note = Description of Artificial Sequence: Synthetic polynucleotide
  source 1..2214: mol_type = other DNA
atggctgccgatggttatcttccagattggctcgaggacaaccttagtgaaggaattcgcgagtggtgggctttgaaacctggagcccctcaacccaaggcaaatcaacaacatcaagacaacgctcgaggtcttgtgcttccgggttacaaataccttggacccggcaacggactcgacaagggggagccggtcaacgcagcagacgcggcggccctcgagcacgacaaggcctacgaccagcagctgcaggcgggtgacaatccgtacctgcggtataaccacgccgacgccgagtttcaggagcgtctgcaagaagatacgtcttttgggggcaaccttggcagagcagtcttccaggccaaaaagaggatccttgagcctcttggtctggttgaggaagcagctaaaacggctcctggaaagaagaggcctgtagatcagtctcctcaggaaccggactcatcatctggtgttggcaaatcgggcaaacagcctgccagaaaaagactaaatttcggtcagactggcgactcagagtcagtcccagaccctcaacctctcggagaaccaccagcagcccccacaagtttgggatctaatacaatggcttcaggcggtggcgcaccaatggcagacaataacgagggtgccgatggggtgggtagttcctcgggaaattggcattgcgattcccaatgactgggggacagagtcatcaccaccagcacccgaacctgggccctgcccacctacaacaatcacctctacaagcaaatctccaacgggacatcgggaggagccaccaacgacaacacctacttcggctacagcaccccctgggggtattttgactttaacagattccactgccacttttcaccacgtgactggcagcgactcatcaacaacaactggggattccggcccaagagactcagcttcaagctcttcaacatccaggtcaaggaggtcacgcagaatgaaggcaccaagaccatcgccaataacctcaccagcaccatccaggtgtttacggactcggagtaccagctgccgtacgttctcggctctgcgcaccagggctgcctccctccgttcccggcggacgtgttcatgattccgcaatacggctacctgacgctcaacaatggcagccaagccgtgggacgttcatccttttactgcctggaatatttcccttctcagatgctgagaacgggcaacaactttaccttcagctacacctttgaggaagtgcctttccacagcagctacgcgcacagccagagcttggaccggctgatgaatcctctgattgaccagtacctgtactacttgtctcggactcaaacaacaggaggcacggcaaatacgcagactctgggcttcagccaaggtgggcctaatacaatggccaatcaggcaaagaactggctgccaggaccctgttaccgccaacaacgcgtctcaacgacaaccgggcaaaacaacaatagcaactttgcctggactgctgggaccaaataccatctgaatggaagaaattcattggctaatcctggcatcgctatggcaacacacaaagacgacgaggagcgtttttttcccagtaacgggatcctgatttttggcaaacaaaatgctgccagagacaatgcggattacagcgatgtcatgctcaccagcgaggaagaaatcaaaaccactaaccctgtggctacagaggaatacggtatcgtggcagataacttgcagcagcaaaacacggctcctcaaattggaactgtcaacagccagggggccttacccggtatggtctggcagaaccgggacgtgtacctgcagggtcccatctgggccaagattcctcacacggacggcaacttccacccgtctccgctgatgggcggctttggcctgaaacatcctccgcctcagatcctgatcaagaacacgcctgtacctgcggatcctccgaccaccttcaaccagtcaaagctgaactctttcatcacgcaatacagcaccggacaggtcagcgtggagatcgagtgggagctgcagaaggaaaacagcaagcgctggaacccggagatccagtacacttccaactattacaagtctaataatgttgaatttgctgttaatactgaaggtgtatatagtgaaccccgccccattggcaccagatacctgactcgtaatctgtaa

SEQ ID NO: 364 - protein, 736 aa, synthetic construct
  REGION 1..736: note = Description of Artificial Sequence: Synthetic polypeptide
MAADGYLPDWLEDNLSEGIREWWALKPGAPQPKANQQHQDNARGLVLPGYKYLGPGNGLDKGEPVNAADAAALEHDKAYDQQLQAGDNPYLRYNHADAEFQERLQEDTSFGGNLGRAVFQAKKRILEPLGLVEEAAKTAPGKKRPVDQSPQEPDSSSGVGKSGKQPARKRLNFGQTGDSESVPDPQPLGEPPAAPTSLGSNTMASGGGAPMADNNEGADGVGSSSGNWHCDSQLGDRVITTSTRTWALPTYNNHLYKQISNGTSGGATNDNTYFGYSTPWGYFDFNRFHCHFSPRDWQRLINNNWGFRPKRLSFKLFNIQVKEVTQNEGTKTIANNLTSTIQVFTDSEYQLPYVLGSAHQGCLPPFPADVFMIPQYGYLTLNNGSQAVGRSSFYCLEYFPSQMLRTGNNFTFSYTFEEVPFHSSYAHSQSLDRLMNPLIDQYLYYLSRTQTTGGTANTQTLGFSQGGPNTMANQAKNWLPGPCYRQQRVSTTTGQNNNSNFAWTAGTKYHLNGRNSLANPGIAMATHKDDEERFFPSNGILIFGKQNAARDNADYSDVMLTSEEEIKTTNPVATEEYGIVADNLQQQNTAPQIGTVNSQGALPGMVWQNRDVYLQGPIWAKIPHTDGNFHPSPLMGGFGLKHPPPQILIKNTPVPADPPTTFNQSKLNSFITQYSTGQVSVEIEWELQKENSKRWNPEIQYTSNYYKSNNVEFAVNTEGVYSEPRPIGTRYLTRNL

SEQ ID NO: 365 - DNA, 2214 bp, synthetic construct
  misc_feature 1..2214: note = Description of Artificial Sequence: Synthetic polynucleotide
  source 1..2214: mol_type = other DNA
atggctgccgatggttatcttccagattggctcgaggacaaccttagtgaaggaattcgcgagtggtgggctttgaaacctggagcccctcaacccaaggcaaatcaacaacatcaagacaacgctcgaggtcttgtgcttccgggttacaaataccttggacccggcaacggactcgacaagggggagccggtcaacgcagcagacgcggcggccctcgagcacgacaaggcctacgaccagcagctgcaggcgggtgacaatccgtacctgcggtataaccacgccgacgccgagtttcaggagcgtctgcaagaagatacgtcttttgggggcaaccttggcagagcagtcttccaggccaaaaagaggatccttgagcctcttggtctggttgaggaagcagctaaaacggctcctggaaagaagaggcctgtagatcagtctcctcaggaaccggactcatcatctggtgttggcaaatcgggcaaacagcctgccagaaaaagactaaatttcggtcagactggcgactcagagtcagtcccagaccctcaacctctcggagaaccaccagcagcccccacaagtttgggatctaatacaatggcttcaggcggtggcgcaccaatggcagacaataacgagggtgccgatggggtgggtagttcctcgggaaattggcattgcgattcccaatggctgggggacagagtcatcaccaccagcacccgaacctgggccctgcccacctacaacaatcacctctacaagcaaatctccaacgggacatcgggaggagccaccaacgacaacacctacttcggctacagcaccccctgggggtattttgactttaacagattccactgccacttttcaccacgtgactggcagcgactcatcaacaacaactggggattccggcccaagagactcagcttcaagctcttcaacatccaggtcaaggaggtcacgcagaatgaaggcaccaagaccatcgccaataacctcaccagcaccatccaggtgtttacggactcggagtaccagctgccgtacgttctcggctctgcgcaccagggctgcctccctccgttcccggcggacgtgttcatgattccgcaatacggctacctgacgctcaacaatggcagccaagccgtgggacgttcatccttttactgcctggaatatttcccttctcagatgctgagaacgggcaacaactttaccttcagctacacctttgaggaagtgccttttcacagcagctacgcgcacagccagagcttggaccggctgatgaatcctctgattgaccagtacctgtactacttgtctcggactcaaacaacaggaggcacggcaaatacgcagactctgggcttcagccaaggtgggcctaatacaatggccaatcaggcaaagaactggctgccaggaccctgttaccgccaacaacgcgtctcaacgacaaccgggcaaaacaacaatagcaactttgcctggactgctgggaccaaataccatctgaatggaagaaattcattggctaatcctggcatcgctatggcaacacacaaagacgacgaggagcgtttttttcccagtaacgggatcctgatttttggcaaacaaaatgctgccagagacaatgcggattacagcgatgtcatgctcaccagcgaggaagaaatcaaaaccactaaccctgtggctacagaggaatacggtatcgtggcagataacttgcagcagcaaaacacggctcctcaaattggaactgtcaacagccagggggccttacccggtatggtctggcagaaccgggacgtgtacctgcagggtcccatctgggccaagattcctcacacggacggcaacttccacccgtctccgctgatgggcggctttggcctgaaacatcctccgcctcagatcctgatcaagaacacgcctgtacctgcggatcctccgaccaccttcaaccagtcaaagctgaactctttcatcacgcaatacagcaccggacaggtcagcgtggagatcgagtgggagctgcagaaggaaaacagcaagcgctggaacccggagatccagtacacttccaactattacaagtctaataatgttgaatttgctgttaatactgaaggtgtatatagtgaaccccgccccattggcaccagatacctgactcgtaatctgtaa

SEQ ID NO: 366 - protein, 737 aa, synthetic construct; identical to SEQ ID NO: 354
  REGION 1..737: note = Description of Artificial Sequence: Synthetic polypeptide

SEQ ID NO: 367 - DNA, 2211 bp, synthetic construct
  misc_feature 1..2211: note = Description of Artificial Sequence: Synthetic polynucleotide
  source 1..2211: mol_type = other DNA
atggctgccgatggttatcttccagattggctcgaggacaacctctctgagggcattcgcgagtggtgggacttgaaacctggagcccctaaacccaaggcaaatcaacaacatcaggacaacgctcgaggtcttgtgcttccgggttacaaataccttggacccggcaacggactcgacaagggggagccggtcaacgcagcagacgcggcggccctcgagcacgacaaggcctacgaccagcagctcaaggccggagacaacccgtacctcaagtacaaccacgccgacgccgagttccaggagcggctcaaagaagatacgtcttttgggggcaacctcgggcgagcagtcttccaggccaaaaagaggcttcttgaacctcttggtctggttgaggaagcggctaagacggctcctggaaagaagagaccggtagagccatcaccccagcgttctccagactcctctacgggcatcggcaagaaaggccaacagcccgctaaaaagagactcaattttggtcagactggcgactcagagtcagtccccgacccacaacctctcggagaacctccagcaacccccgctgctgtgggacctactacaatggcttcaggcggtggcgcaccaatggcagacaataacgagggtgccgatggagtgggtaattcctcaggaaattggcattgcgattcccaatggctgggcgacagagtcatcaccaccagcaccagaacctgggccctgcccacttacaacaaccatctctacaagcaaatctccagccaatcaggagcttcaaacgacaaccactactttggctacagcaccccttgggggtattttgactttaacagattccactgccacttttcaccacgtgactggcaaagactcatcaacaacaactggggattccgacccaagagactcaacttcaagctcttcaacatccaagtcaaggaggtcacgacgaatgatggcgtcacgaccatcgctaataaccttaccagcacggttcaagtcttctcggactcggagtaccagttgccgtacgtcctcggctctgcgcaccagggctgcctccctccgttcccggcggacgtgttcatgattccgcagtacggctacctaacgctcaacaatggcagccaagccgtgggacgttcatccttttactgcctggaatatttcccttctcagatgctgagaacgggcaacaactttaccttcagctacacttttgaggacgttcctttccacagcagctacgctcacagccagagtctggaccgtctcatgaatcctctcatcgaccagtacctgtattacttgagcagaacaaacactccaagtggaaccaccacgcagtcaaggcttcagttttctcaggccggagcgagtgacattcgggaccagtctaggaactggcttcctggaccctgttaccgccagcagcgcgtttctaaaacaaaaacagacaacaacaacagcaattttacctggactggtgcttcaaaatataaccttaatgggcgtgaatctataatcaaccctggcactgctatggcctcacacaaagacgacgaagacaagttctttcccatgagcggtgtcatgatttttggaaaagagagcgccggagcttcaaacactgcattggacaatgtcatgattacagacgaagaggaaattaaagccactaaccctgtggccaccgaaagatttgggaccgtggcagtcaatttccagagcagcagcacagaccctgcgaccggagatgtgcatgctatgggagcattacctggcatggtgtggcaagatagagacgtgtacctgcagggtcccatttgggccaaaattcctcacacagatggacactttcacccgtctcctcttatgggcggctttggactcaagaacccgcctcctcagatcctcatcaaaaacacgcctgttcctgcgaatcctccggcggagttttcagctacaaagtttgcttcattcatcacccaatactccacaggacaagtgagtgtggaaattgaatgggagctgcagaaagaaaacagcaagcgctggaatcccgaagtgcagtacacatccaattatgcaaaatctgccaacgttgattttactgtggacaacaatggactttatactgagcctcgccccattggcacccgttaccttacccgtcccctgtaa

SEQ ID NO: 368 - protein, 736 aa, synthetic construct
  REGION 1..736: note = Description of Artificial Sequence: Synthetic polypeptide
MAADGYLPDWLEDNLSEGIREWWDLKPGAPKPKANQQHQDNARGLVLPGYKYLGPGNGLDKGEPVNAADAAALEHDKAYDQQLKAGDNPYLKYNHADAEFQERLKEDTSFGGNLGRAVFQAKKRLLEPLGLVEEAAKTAPGKKRPVEPSPQRSPDSSTGIGKKGQQPAKKRLNFGQTGDSESVPDPQPLGEPPATPAAVGPTTMASGGGAPMADNNEGADGVGNSSGNWHCDSQWLGDRVITTSTRTWALPTYNNHLYKQISSQSGASNDNHYFGYSTPWGYFDFNRFHCHFSPRDWQRLINNNWGFRPKRLNFKLFNIQVKEVTTNDGVTTIANNLTSTVQVFSDSEYQLPYVLGSAHQGCLPPFPADVFMIPQYGYLTLNNGSQAVGRSSFYCLEYFPSQMLRTGNNFTFSYTFEDVPFHSSYAHSQSLDRLMNPLIDQYLYYLSRTNTPSGTTTQSRLQFSQAGASDIRDQSRNWLPGPCYRQQRVSKTKTDNNNSNFTWTGASKYNLNGRESIINPGTAMASHKDDEDKFFPMSGVMIFGKESAGASNTALDNVMITDEEEIKATNPVATERFGTVAVNFQSSSTDPATGDVHAMGALPGMVWQDRDVYLQGPIWAKIPHTDGHFHPSPLMGGFGLKNPPPQILIKNTPVPANPPAEFSATKFASFITQYSTGQVSVEIEWELQKENSKRWNPEVQYTSNYAKSANVDFTVDNNGLYTEPRPIGTRYLTRPL

SEQ ID NO: 369 - DNA, 2211 bp, synthetic construct
  misc_feature 1..2211: note = Description of Artificial Sequence: Synthetic polynucleotide
  source 1..2211: mol_type = other DNA
atggctgccgatggttatcttccagattggctcgaggacaaccttagtgaaggaattcgcgagtggtgggcgctgaaacctggagccccgaagcccaaagccaaccagcaaaagcaggacgacggccggggtctggtgcttccgggttacaaatacctcggacccggtaacggactcgacaaaggagagccggtcaacgaggcggacgcggcagccctcgagcacgacaaggcctacgaccagcagctcaaagcgggtgacaatccgtacctgcggtataaccacgccgacgccgagtttcaggagcgtctgcaagaagatacgtcttttgggggcaacctcgggcgagcagtcttccaggccaagaagcgggttctcgaacctctcggtctggttgaggaaggcgctaagacggctcccggaaagaaacgtccggtagagcagtcgccacaagagccagactcctctacgggcatcggcaagaaaggccaacagcccgccagaaaaagactcaatttcggtcagactggcgactcagagtcagttccagaccctcaacctctcggagaacctccagcagcgccctctggtgtgggacctactacaatggcttcaggcggtggcgcaccaatggcagacaataacgaaggcgccgacggagtgggtaatgcctcaggaaattggcattgcgattccacatggctgggcgacagagtcatcaccaccagcacccgaacatgggccttgcccacctataacaaccacctctacaagcaaatctccagtgcttcaacgggggccagcaacgacaacacctacttcggctacagcaccccctgggggtattttgatttcaacagattccactgccatttctcaccacgtgactggcagcgactcatcaacaacaattggggattccggcccaagagactcaacttcaaactcttcaacatccaagtcaaggaggtcacgacgaatgatggcgtcacgaccatcgctaataaccttaccagcacggttcaagtcttctcggactcggagtaccagttgccgtacgtcctcggctctgcgcaccagggctgcctccctccgttcccggcggacgtgttcatgattccgcagtacggctacctaacgctcaacaatggcagccaggcagtgggacggtcatccttttactgcctggaatatttcccatcgcagatgctgagaacgggcaataactttaccttcagctacaccttcgaggacgtgcctttccacagcagctacgcgcacagccagagcctggaccggctgatgaatcctctcatcgaccagtacctgtattacctgaacagaactcagaatcagtccggaagtgcccaaaacaaggacttgctgtttagccgggggtctccagctggcatgtctgttcagcccaaaaactggctacctggaccctgttatcggcagcagcgcgtttctaaaacaaaaacagacaacaacaacagcaattttacctggactggtgcttcaaaatataacctcaatgggcgtgaatccatcatcaaccctggcactgctatggcctcacacaaagacgacgaagacaagttctttcccatgagcggtgtcatgatttttggaaaagagagcgccggagcttcaaacactgcattggacaatgtcatgattacagacgaagaggaaattaaagccactaaccctgtggccaccgaaagatttgggaccgtggcagtcaatttccagagcagcagcacagaccctgcgaccggagatgtgcatgttatgggagccttacctggaatggtgtggcaagacagagacgtatacctgcagggtcctatttgggccaaaattcctcacacagatggacactttcacccgtctcctcttatgggcggctttggactcaagaacccgcctcctcagatcctcatcaaaaacacgcctgttcctgcgaatcctccggcagagttttcggctacaaagtttgcttcattcatcacccagtattccacaggacaagtgagcgtggagattgaatgggagctgcagaaagaaaacagcaaacgctggaatcccgaagtgcagtatacatctaactatgcaaaatctgccaacgttgatttcactgtggacaacaatggactttatactgagcctcgccccattggcacccgttacctcacccgtcccctgtaa

SEQ ID NO: 370 - protein, 736 aa, synthetic construct
  REGION 1..736: note = Description of Artificial Sequence: Synthetic polypeptide
MAADGYLPDWLEDNLSEGIREWWALKPGAPKPKANQQKQDDGRGLVLPGYKYLGPGNGLDKGEPVNEADAAALEHDKAYDQQLKAGDNPYLRYNHADAEFQERLQEDTSFGGNLGRAVFQAKKRVLEPLGLVEEGAKTAPGKKRPVEQSPQEPDSSTGIGKKGQQPARKRLNFGQTGDSESVPDPQPLGEPPAAPSGVGPTTMASGGGAPMADNNEGADGVGNASGNWHCDSTWLGDRVITTSTRTWALPTYNNHLYKQISSASTGASNDNTYFGYSTPWGYFDFNRFHCHFSPRDWQRLINNNWGFRPKRLNFKLFNIQVKEVTTNDGVTTIANNLTSTVQVFSDSEYQLPYVLGSAHQGCLPPFPADVFMIPQYGYLTLNNGSQAVGRSSFYCLEYFPSQMLRTGNNFTFSYTFEDVPFHSSYAHSQSLDRLMNPLIDQYLYYLNRTQNQSGSAQNKDLLFSRGSPAGMSVQPKNWLPGPCYRQQRVSKTKTDNNNSNFTWTGASKYNLNGRESIINPGTAMASHKDDEDKFFPMSGVMIFGKESAGASNTALDNVMITDEEEIKATNPVATERFGTVAVNFQSSSTDPATGDVHVMGALPGMVWQDRDVYLQGPIWAKIPHTDGHFHPSPLMGGFGLKNPPPQILIKNTPVPANPPAEFSATKFASFITQYSTGQVSVEIEWELQKENSKRWNPEVQYTSNYAKSANVDFTVDNNGLYTEPRPIGTRYLTRPL

SEQ ID NO: 371 - DNA, 2205 bp, synthetic construct
  misc_feature 1..2205: note = Description of Artificial Sequence: Synthetic polynucleotide
  source 1..2205: mol_type = other DNA
atggctgctgacggttatcttccagattggctcgaggacaacctttctgaaggcattcgtgagtggtgggctctgaaacctggagtccctcaacccaaagcgaaccaacaacaccaggacaaccgtcggggtcttgtgcttccgggttacaaatacctcggacccggtaacggactcgacaaaggagagccggtcaacgaggcggacgcggcagccctcgaacacgacaaggcctacgaccagcagctcaaggccggagacaacccgtacctcaagtacaaccacgccgacgccgagttccaggagcggctcaaagaagatacgtcttttgggggcaacctcgggcgagcagtcttccaggccaaaaagaggcttcttgaacctcttggtctggttgaggaagcggctaagacggctcctggaaagaagaggcctgtagagcagtctcctcaggaaccggactcctccgcgggtattggcaaatcgggtgcacagcccgctaaaaagagactcaatttcggtcagactggcgacacagagtcagtcccagaccctcaaccaatcggagaacctcccgcagccccctcaggtgtgggatctcttacaatggcttcaggtggtggcgcaccagtggcagacaataacgaaggtgccgatggagtgggtagttcctcgggaaattggcattgcgattcccaatggctgggggacagagtcatcaccaccagcacccgaacctgggccctgcccacctacaacaaccacctctacaaacaaatttccagccaatcaggagcctcgaacgacaatcactactttggctacagcaccccttgggggtattttgacttcaacagattccactgccacttttcaccacgtgactggcagcgactcatcaacaacaactggggattccggcccaagagactcagcttcaagctcttcaacatccaggtcaaagaggttacggacaacaatggagtcaagaccatcgccaataaccttaccagcacggtccaggtcttcacggactcagactatcagctcccgtacgtgctcgggtcggctcacgagggctgcctcccgccgttcccagcggacgttttcatgattcctcagtacgggtatctgacgcttaatgatggaagccaggccgtgggtcgttcgtccttttactgcctggaatatttcccgtcgcaaatgctaagaacgggtaacaacttccagttcagctacgagtttgagaacgtacctttccatagcagctacgctcacagccaaagcctggaccgactaatgaatccactcatcgaccaatacttgtactatctctcaaagactattaacggttctggacagaatcaacaaacgctaaaattcagtgtggccggacccagcaacatggctgtccagggaagaaactacatacctggacccagctaccgacaacaacgtgtctcaaccactgtgactcaaaacaacaacagcgaatttgcttggcctggagcttcttcttgggctctcaatggacgtaatagcttgatgaatcctggacctgctatggccagccacaaagaaggagaggaccgtttctttcctttgtctggatctttaatttttggcaaacaaggaactggaagagacaacgtggatgcggacaaagtcatgataaccaacgaagaagaaattaaaactactaacccggtagcaacggagtcctatggacaagtggccacaaaccaccagagtgcccaagcacaggcgcagaccggctgggttcaaaaccaaggaatacttccgggtatggtttggcaggacagagatgtgtacctgcaaggacccatctgggccaagattcctcacacggacggcaacttccacccgtctccgctgatgggcggctttggcctgaaacatcctccgcctcagatcctgatcaagaacacgcctgtacctgcggatcctccgaccaccttcaaccagtcaaagctgaactctttcatcacgcaatacagcaccggacaggtcagcgtggaaattgaatgggagctgcagaaggaaaacagcaagcgctggaatcccgaagtgcagtatacatctaactatgcaaaatctgccaacgttgatttcactgtggacaacaatggactttatactgagcctcgccccattggcacccgttacctcacccgtcccctgtaa

SEQ ID NO: 372 - protein, 734 aa, synthetic construct
  REGION 1..734: note = Description of Artificial Sequence: Synthetic polypeptide
MAADGYLPDWLEDNLSEGIREWWALKPGVPQPKANQQHQDNRRGLVLPGYKYLGPGNGLDKGEPVNEADAAALEHDKAYDQQLKAGDNPYLKYNHADAEFQERLKEDTSFGGNLGRAVFQAKKRLLEPLGLVEEAAKTAPGKKRPVEQSPQEPDSSAGIGKSGAQPAKKRLNFGQTGDTESVPDPQPIGEPPAAPSGVGSLTMASGGGAPVADNNEGADGVGSSSGNWHCDSQWLGDRVITTSTRTWALPTYNNHLYKQISSQSGASNDNHYFGYSTPWGYFDFNRFHCHFSPRDWQRLINNNWGFRPKRLSFKLFNIQVKEVTDNNGVKTIANNLTSTVQVFTDSDYQLPYVLGSAHEGCLPPFPADVFMIPQYGYLTLNDGSQAVGRSSFYCLEYFPSQMLRTGNNFQFSYEFENVPFHSSYAHSQSLDRLMNPLIDQYLYYLSKTINGSGQNQQTLKFSVAGPSNMAVQGRNYIPGPSYRQQRVSTTVTQNNNSEFAWPGASSWALNGRNSLMNPGPAMASHKEGEDRFFPLSGSLIFGKQGTGRDNVDADKVMITNEEEIKTTNPVATESYGQVATNHQSAQAQAQTGWVQNQGILPGMVWQDRDVYLQGPIWAKIPHTDGNFHPSPLMGGFGLKHPPPQILIKNTPVPADPPTTFNQSKLNSFITQYSTGQVSVEIEWELQKENSKRWNPEVQYTSNYAKSANVDFTVDNNGLYTEPRPIGTRYLTRPL

SEQ ID NO: 373 - DNA, 2211 bp, synthetic construct
  misc_feature 1..2211: note = Description of Artificial Sequence: Synthetic polynucleotide
  source 1..2211: mol_type = other DNA
atggctgccgatggttatcttccagattggctcgaggacaacctctctgagggcattcgcgagtggtgggcgctgaaacctggagccccgaagcccaaagccaaccagcaaaagcaggacgacggccggggtctggtgcttcctggctacaagtacctcggacccttcaacggactcgacaagggggagcccgtcaacgcggcggacgcagcggccctcgagcacgacaaggcctacgaccagcagctgcaggcgggtgacaatccgtacctgcggtataaccacgccgacgccgagtttcaggagcgtctgcaagaagatacgtcttttgggggcaacctcgggcgagcagtcttccaggccaagaagtgggttctcgaacctctcggtctggttgaggaaggcgctaagacggctcctggaaagaaacgtccggtagagcagtcgccacaagagccagactcctcctcgggcatcggcaagacaggccagcagcccgctaaaaagagactcaattttggtcagactggcgactcagagtcagtccccgacccacaacctctcggagaacctccagcaacccccgctgctgtgggacctactacaatggcttcaggcggtggcgcaccaatggcagacaataacgaaggcgccgacggagtgggtaatgcctcaggaaattggcattgcgattccacatggctgggcgacagagtcatcaccaccagcacccgcacctgggccttgcccacctacaataaccacctctacaagcaaatctccagtgcttcaacgggggccagcaacgacaaccactacttcggctacagcaccccctgggggtattttgatttcaacagattccactgccatttctcaccacgtgactggcagcgactcatcaacaacaattggggattccggcccaagagactcaacttcaagctcttcaacatccaagtcaaggaggtcacgacgaatgatggcgtcacaaccatcgctaataaccttaccagcacggttcaagtcttctcggactcggagtaccagcttccgtacgtcctcggctctgcgcaccagggctgcctccctccgttcccggcggacgtgttcatgattccgcaatacggctacctgacgctcaacaatggcagccaagccgtgggacgttcatccttttactgcctggaatatttcccttctcagatgctgagaacgggcaacaactttaccttcagctacacctttgaggaagtgcctttccacagcagctacgcgcacagccagagcctggaccggctgatgaatcctctcatcgaccaatacctgtattacctgaacagaactcaaaatcagtccggaagtgcccaaaacaaggacttgctgtttagccgtgggtctccagctggcatgtctgttcagcccaaaaactggctacctggaccctgttatcggcagcagcgcgtttctaaaacaaaaacagacaacaacaacagcaattttacctggactggtgcttcaaaatataacctcaatgggcgtgaatccatcatcaaccctggcactgctatggcctcacacaaagacgacgaagacaagttctttcccatgagcggtgtcatgatttttggaaaggagagcgccggagcttcaaacactgcattggacaatgtcatgatcaccgacgaagaggaaatcaaagccactaaccccgtggccaccgaaagatttgggactgtggcagtcaatctccagagcagcagcacagaccctgcgaccggagatgtgcatgttatgggagccttacctggcatggtgtggcaagatagagacgtgtacctgcagggtcccatttgggccaaaattcctcacacagatggacactttcacccgtctcctcttatgggcggctttggactcaagaacccgcctcctcagatcctcatcaaaaacacgcctgttcctgcgaatcctccggcggagttttcagctacaaagtttgcttcattcatcacccaatactccacaggacaagtgagtgtggaaattgaatgggagctgcagaaagaaaacagcaagcgctggaatcccgaagtgcagtacacatccaattatgcaaaatctgccaacgttgattttactgtggacaacaatggactttatactgagcctcgccccattggcacccgttacctcacccgtcccctgtaa

SEQ ID NO: 374 - protein, 736 aa, synthetic construct
  REGION 1..736: note = Description of Artificial Sequence: Synthetic polypeptide
MAADGYLPDWLEDNLSEGIREWWALKPGAPKPKANQQKQDDGRGLVLPGYKYLGPFNGLDKGEPVNAADAAALEHDKAYDQQLQAGDNPYLRYNHADAEFQERLQEDTSFGGNLGRAVFQAKKWVLEPLGLVEEGAKTAPGKKRPVEQSPQEPDSSSGIGKTGQQPAKKRLNFGQTGDSESVPDPQPLGEPPATPAAVGPTTMASGGGAPMADNNEGADGVGNASGNWHCDSTWLGDRVITTSTRTWALPTYNNHLYKQISSASTGASNDNHYFGYSTPWGYFDFNRFHCHFSPRDWQRLINNNWGFRPKRLNFKLFNIQVKEVTTNDGVTTIANNLTSTVQVFSDSEYQLPYVLGSAHQGCLPPFPADVFMIPQYGYLTLNNGSQAVGRSSFYCLEYFPSQMLRTGNNFTFSYTFEEVPFHSSYAHSQSLDRLMNPLIDQYLYYLNRTQNQSGSAQNKDLLFSRGSPAGMSVQPKNWLPGPCYRQQRVSKTKTDNNNSNFTWTGASKYNLNGRESIINPGTAMASHKDDEDKFFPMSGVMIFGKESAGASNTALDNVMITDEEEIKATNPVATERFGTVAVNLQSSSTDPATGDVHVMGALPGMVWQDRDVYLQGPIWAKIPHTDGHFHPSPLMGGFGLKNPPPQILIKNTPVPANPPAEFSATKFASFITQYSTGQVSVEIEWELQKENSKRWNPEVQYTSNYAKSANVDFTVDNNGLYTEPRPIGTRYLTRPL

SEQ ID NO: 375 - DNA, 2214 bp, synthetic construct
  misc_feature 1..2214: note = Description of Artificial Sequence: Synthetic polynucleotide
  source 1..2214: mol_type = other DNA
atggctgccgatggttatcttccagattggctcgaggacaaccttagtgaaggaattcgcgagtggtgggctttgaaacctggagcccctcaacccaaggcaaatcaacaacatcaagacaacgctcgaggtcttgtgcttccgggttacaaataccttggacccggcaacggactcgacaagggggagccggtcaacgcagcagacgcggcggccctcgagcacgacaaggcctacgaccagcagctgcaggcgggtgacaatccgtacctgcggtataaccacgccgacgccgagtttcaggagcgtctgcaagaagatacgtcttttgggggcaaccttggcagagcagtcttccaggccaaaaagaggatccttgagcctcttggtctggttgaggaagcagctaaaacggctcctggaaagaagaggcctgtagatcagtctcctcaggaaccggactcatcatctggtgttggcaaatcgggcaaacagcctgccagaaaaagactaaatttcggtcagactggcgactcagagtcagtcccagaccctcaacctctcggagaaccaccagcagcccccacaagtttgggatctaatacaatggcttcaggcggtggcgcaccaatggcagacaataacgagggtgccgatggggtgggtagttcctcgggaaattggcattgcgattcccaatggctgggggacagagtcatcaccaccagcacccgaacctgggccctgcccacctacaacaatcacctctacaagcaaatctccaacgggacatcgggaggagccaccaacgacaacacctacttcggctacagcaccccctgggggtattttgactttaacagattccactgccacttttcaccacgtgactggcagcgactcatcaacaacaactggggattccggcccaagagactcagcttcaagctcttcaacatccaggtcaaggaggtcacgcagaatgaaggcaccaagaccatcgccaataacctcaccagcaccatccaggtgtttacggactcggagtaccagctgccgtacgttctcggctcggcgcaccagggctgcctccctccgttcccggcggacgtcttcatggtgccacagtatggatacctgacgctcaacaatggcagccaagccgtgggacgttcatccttttactgcctggaatatttcccttctcagatgctgagaacgggcaacaactttaccttcagctacacctttgaggaagtgcctttccacagcagctacgcgcacagccagagcttggaccggctgatgaatcctctgattgaccagtacctgtactacttgtctcggactcaaacaacaggaggcacggcaaatacgcagactctgggcttcagccaaggtgggcctaatacaatggccaatcaggcaaagaactggctgccaggaccctgttaccgccaacaacgcgtctcaacgacaaccgggcaaaacaacaatagcaactttgcctggactgctgggaccaaataccatctgaatggaagaaattcattggctaatcctggcatcgctatggcaacacacaaagacgacgaggagcgtttttttcccagtaacgggatcctgatttttggcaaacaaaatgctgccagagacaatgcggattacagcgatgtcatgctcaccagcgaggaagaaatcaaaaccactaaccctgtggctacagaggaatacggtatcgtggcagataacttgcagcagcaaaacacggctcctcaaattggaactgtcaacagccagggggacttacccggtatggtctggcagaaccgggacgtgtacctgcagggtcccatctgggccaagattcctcacacggacggcaacttccacccgtctccgctgatgggcggctttggcctgaaacatcctccgcctcagatcctgatcaagaacacgcctgtacctgcggatcctccgaccaccttcaaccagtcaaagctgaactctttcatcacgcaatacagcaccggacaggtcagcgtggagatcgagtgggagctgcagaaggaaaacagcaagcgctggaacccggagatccagtacacttccaactattacaagtctaataatgttgaatttgctgttaatactgaaggtgtatatagtgaaccccgccccattggcaccagatacctgactcgtaatctgtaa

SEQ ID NO: 376 - protein, 737 aa, synthetic construct
  REGION 1..737: note = Description of Artificial Sequence: Synthetic polypeptide
MAADGYLPDWLEDNLSEGIREWWALKPGAPQPKANQQHQDNARGLVLPGYKYLGPGNGLDKGEPVNAADAAALEHDKAYDQQLQAGDNPYLRYNHADAEFQERLQEDTSFGGNLGRAVFQAKKRILEPLGLVEEAAKTAPGKKRPVDQSPQEPDSSSGVGKSGKQPARKRLNFGQTGDSESVPDPQPLGEPPAAPTSLGSNTMASGGGAPMADNNEGADGVGSSSGNWHCDSQWLGDRVITTSTRTWALPTYNNHLYKQISNGTSGGATNDNTYFGYSTPWGYFDFNRFHCHFSPRDWQRLINNNWGFRPKRLSFKLFNIQVKEVTQNEGTKTIANNLTSTIQVFTDSEYQLPYVLGSAHQGCLPPFPADVFMVPQYGYLTLNNGSQAVGRSSFYCLEYFPSQMLRTGNNFTFSYTFEEVPFHSSYAHSQSLDRLMNPLIDQYLYYLSRTQTTGGTANTQTLGFSQGGPNTMANQAKNWLPGPCYRQQRVSTTTGQNNNSNFAWTAGTKYHLNGRNSLANPGIAMATHKDDEERFFPSNGILIFGKQNAARDNADYSDVMLTSEEEIKTTNPVATEEYGIVADNLQQQNTAPQIGTVNSQGDLPGMVWQNRDVYLQGPIWAKIPHTDGNFHPSPLMGGFGLKHPPPQILIKNTPVPADPPTTFNQSKLNSFITQYSTGQVSVEIEWELQKENSKRWNPEIQYTSNYYKSNNVEFAVNTEGVYSEPRPIGTRYLTRNL

SEQ ID NO: 377 - DNA, 2205 bp, synthetic construct
  misc_feature 1..2205: note = Description of Artificial Sequence: Synthetic polynucleotide
  source 1..2205: mol_type = other DNA
atggctgctgacggttatcttccagattggctcgaggacaacctttctgaaggcattcgtgagtggtgggctctgaaacctggagtccctcaacccaaagcgaaccaacaacaccaggacaactgtcggggtcttgtgcttccgggttacaaatacctcggacccggtaacggactcgacaaaggagagccggtcaacgaggcggacgcggcagccctcgaacacgacaaggcctacgaccagcagctcaaggccggagacaacccgtacctcaagtacaaccacgccgacgccgagttccaggagcggctcaaagaagatacgtcttttgggggcaacctcgggcgagcagtcttccagaccaaaaagaggcttcttgaacctcttggtctggttgaggaagcggctaagacggctcctggaaagaagaggcctgtagagcagtctcctcaggaaccggactcctccgcgggtattggcaaatcgggtgcacagcccgctaaaaagagactcaatttcggtcagactggcgacacagagtcagtcccagaccctcaaccaatcggagaacctcccgcagccccctcaggtgtgggatctcttacaatggcttcaggtggtggcgcaccagtggcagacaataacgaaggtgccgatggagtgggtagttcctcgggaaattggcattgcgattcccaatggctgggggacagagtcatcaccaccagcacccgaacctgggccctgcccacctacaacaaccacctctacaaacaaatttccagccaatcaggagcctcgaacgacaatcactactttggctacagcaccccttgggggtattttgacttcaacagattccactgccacttttcaccacgtgactggcagcgactcatcaacaacaactggggattccggcccaagagactcagcttcaagctcttcaacatccaggtcaaagaggttacggacaacaatggagtcaagaccatcgccaataaccttaccagcacggtccaggtcttcacggactcagactatcagctcccgtacgtgctcgggtcggctcacgagggctgcctcccgccgttcccagcggacgttttcatgattcctcagtacgggtatctgacgcttaatgatggaagccaggccgtgggtcgttcgtccttttactgcctggaatatttcccgtcgcaaatgctaagaacgggtaacaacttccagttcagctacgagtttgagaacgtacctttccatagcagctacgctcacagccaaagcctggaccgactaatgaatccactcatcgaccaatacttgtactatctctcaaagactattaacggttctggacagaatcaacaaacgctaaaattcagtgtggccggacccagcaacatggctgtccagggaagaaactacatacctggacccagctaccgacaacaacgtgtctcaaccactgtgactcaaaacaacaacagcgaatttgcttggcctggagcttcttcttgggctctcaatggacgtaatagcttgatgaatcctggacctgctatggccagccacaaagaaggagaggaccgtttctttcctttgtctggatctttaatttttggcaaacaaggaactggaagagacaacgtggatgcggacaaagtcatgataaccaacgaagaagaaattaaaactactaacccggtagcaacggagtcctatggacaagtggccacaaaccaccagagtgcccaagcacaggcgcagaccggctgggttcaaaaccaaggaatacttccgggtatggtttggcaggacagagatgtgtacctgcaaggacccatctgggccaagattcctcacacggacggcaacttccacccgtctccgctgatgggcggctttggcctgaaacatcctccgcctcagatcctgatcaagaacacgcctgttcctgcgaatcctccggcggagttttcagctacaaagtttgcttcattcatcacccagtactccacaggacaagtgagtgtggaaattgaatgggagctgcagaaagaaaacagcaagcgctggaatcccgaagtgcagtacacatccaattatgcaaaatctgccaacgttgattttactgtggacaacaatggactttatactgagcctcgccccattggcacccgttaccttaccaaacctctgtaa

SEQ ID NO: 378 - protein, 734 aa, synthetic construct
  REGION 1..734: note = Description of Artificial Sequence: Synthetic polypeptide
MAADGYLPDWLEDNLSEGIREWWALKPGVPQPKANQQHQDNCRGLVLPGYKYLGPGNGLDKGEPVNEADAAALEHDKAYDQQLKAGDNPYLKYNHADAEFQERLKEDTSFGGNLGRAVFQTKKRLLEPLGLVEEAAKTAPGKKRPVEQSPQEPDSSAGIGKSGAQPAKKRLNFGQTGDTESVPDPQPIGEPPAAPSGVGSLTMASGGGAPVADNNEGADGVGSSSGNWHCDSQWLGDRVITTSTRTWALPTYNNHLYKQISSQSGASNDNHYFGYSTPWGYFDFNRFHCHFSPRDWQRLINNNWGFRPKRLSFKLFNIQVKEVTDNNGVKTIANNLTSTVQVFTDSDYQLPYVLGSAHEGCLPPFPADVFMIPQYGYLTLNDGSQAVGRSSFYCLEYFPSQMLRTGNNFQFSYEFENVPFHSSYAHSQSLDRLMNPLIDQYLYYLSKTINGSGQNQQTLKFSVAGPSNMAVQGRNYIPGPSYRQQRVSTTVTQNNNSEFAWPGASSWALNGRNSLMNPGPAMASHKEGEDRFFPLSGSLIFGKQGTGRDNVDADKVMITNEEEIKTTNPVATESYGQVATNHQSAQAQAQTGWVQNQGILPGMVWQDRDVYLQGPIWAKIPHTDGNFHPSPLMGGFGLKHPPPQILIKNTPVPANPPAEFSATKFASFITQYSTGQVSVEIEWELQKENSKRWNPEVQYTSNYAKSANVDFTVDNNGLYTEPRPIGTRYLTKPL

SEQ ID NO: 379 - DNA, 2211 bp, synthetic construct
  misc_feature 1..2211: note = Description of Artificial Sequence: Synthetic polynucleotide
  source 1..2211: mol_type = other DNA
atggctgccgatggttatcttccagattggctcgaggacaacctctctgagggcattcgcgagtggtgggacttgaaacctggagcccctaaacccaaggcaaatcaacaacatcaggacaacgctcgaggtcttgtgcttccgggttacaaataccttggacccggcaacggactcgacaagggggagccggtcaacgcagcagacgcggcggccctcgagcacgacaaggcctacgaccagcagctcaaggccggagacaacccgtacctcaagtacaaccacgccgacgccgagttccaggagcggctcaaagaagatacgtcttttgggggcaacctcgggcgagcagtcttccaggccaaaaagaggcttcttgaacctcttggtctggttgaggaagcggctaagacggctcctggaaagaagagaccggtagagccatcaccccagcgttctccagactcctctacgggcatcggcaagaaaggccaacagcccgctaaaaagagactcaattttggtcagactggcgactcagagtcagtccccgacccacaacctctcggagaacctccagcaacccccgctgctgtgggacctactacaatggcttcaggcggtggcgcaccaatggcagacaataacgagggtgccgatggagtgggtaattcctcaggaaattggcattgcgattcccaatggctgggcgacagagtcatcaccaccagcaccagaacctgggccctgcccacttacaacaaccatctctacaagcaaatctccagccaatcaggagcttcaaacgacaaccactactttggctacagcaccccttgggggtattttgactttaacagattccactgccacttttcaccacgtgactggcaaagactcatcaacaacaactggggattccgacccaagagactcaacttcaagctcttcaacatccaagtcaaggaggtcacgacgaatgatggcgtcacgaccatcgctaataaccttaccagcacggttcaagtcttctcggactcggagtaccagttgccgtacgtcctcggctctgcgcaccagggctgcctccctccgttcccggcggacgtgttcatgattccgcagtacggctacctaacgctcaacaatggcagccaagccgtgggacgttcatccttttactgcctggaatatttcccttctcagatgctgagaacgggcaacaactttaccttcagctacacttttgaggacgttcctttccacagcagctacgctcacagccagagtctggaccgtctcatgaatcctctcatcgaccagtacctgtattacttgagcagaacaaacactccaagtggaaccaccacgcagtcaaggcttcagttttctcaggccggagcgagtgacattcgggaccagtctaggaactggcttcctggaccctgttaccgccagcagcgcgtttctaaaacaaaaacagacaacaacaacagcaattttacctggactggtgcttcaaaatataaccttaatgggcgtgaatctataatcaaccctggcactgctatggcctcacacaaagacgacgaagacaagttctttcccatgagcggtgtcatgatttttggaaaagagagcgccggagcttcaaacactgcattggacaatgtcatgatcacagacgaagaggaaatcaaagccactaaccccgtggccaccgaaagatttgggactgtggcagtcaatctccagagcagcagcacagaccctgcgaccggagatgtgcatgttatgggagcattacctggcatggtgtggcaagatagagacgtgtacctgcagggtcccatttgggccaaaattcctcacacagatggacactttcacccgtctcctcttatgggcggctttggactcaagaacccgcctcctcagatcctcatcaaaaacacgcctgttcctgcgaatcctccggcggagttttcagctacaaagtttgcttcattcatcacccaatactccacaggacaagtgagtgtggaaattgaatgggagctgcagaaagaaaacagcaagcgctggaatcccgaagtgcagtacacatccaattatgcaaaatctgccaacgttgattttactgtggacaacaatggactttatactgagcctcgccccattggcacccgttaccttacccgtcccctgtaa

SEQ ID NO: 380 - protein, 736 aa, synthetic construct
  REGION 1..736: note = Description of Artificial Sequence: Synthetic polypeptide
MAADGYLPDWLEDNLSEGIREWWDLKPGAPKPKANQQHQDNARGLVLPGYKYLGPGNGLDKGEPVNAADAAALEHDKAYDQQLKAGDNPYLKYNHADAEFQERLKEDTSFGGNLGRAVFQAKKRLLEPLGLVEEAAKTAPGKKRPVEPSPQRSPDSSTGIGKKGQQPAKKRLNFGQTGDSESVPDPQPLGEPPATPAAVGPTTMASGGGAPMADNNEGADGVGNSSGNWHCDSQWLGDRVITTSTRTWALPTYNNHLYKQISSQSGASNDNHYFGYSTPWGYFDFNRFHCHFSPRDWQRLINNNWGFRPKRLNFKLFNIQVKEVTTNDGVTTIANNLTSTVQVFSDSEYQLPYVLGSAHQGCLPPFPADVFMIPQYGYLTLNNGSQAVGRSSFYCLEYFPSQMLRTGNNFTFSYTFEDVPFHSSYAHSQSLDRLMNPLIDQYLYYLSRTNTPSGTTTQSRLQFSQAGASDIRDQSRNWLPGPCYRQQRVSKTKTDNNNSNFTWTGASKYNLNGRESIINPGTAMASHKDDEDKFFPMSGVMIFGKESAGASNTALDNVMITDEEEIKATNPVATERFGTVAVNLQSSSTDPATGDVHVMGALPGMVWQDRDVYLQGPIWAKIPHTDGHFHPSPLMGGFGLKNPPPQILIKNTPVPANPPAEFSATKFASFITQYSTGQVSVEIEWELQKENSKRWNPEVQYTSNYAKSANVDFTVDNNGLYTEPRPIGTRYLTRPL

SEQ ID NO: 381 - DNA, 2214 bp, synthetic construct; identical to SEQ ID NO: 353
  misc_feature 1..2214: note = Description of Artificial Sequence: Synthetic polynucleotide
  source 1..2214: mol_type = other DNA

SEQ ID NO: 382 - protein, 737 aa, synthetic construct; identical to SEQ ID NO: 354
  REGION 1..737: note = Description of Artificial Sequence: Synthetic polypeptide

SEQ ID NO: 383 - DNA, 2205 bp, synthetic construct
  misc_feature 1..2205: note = Description of Artificial Sequence: Synthetic polynucleotide
  source 1..2205: mol_type = other DNA
atggctgctgacggttatcttccagattggctcgaggacaacctttctgaaggcattcgtgagtggtgggctctgaaacctggagtccctcaacccaaagcgaaccaacaacaccaggacaaccgtcggggtcttgtgcttccgggttacaaatacctcggacccggtaacggactcgacaaaggagagccggtcaacgaggcggacgcggcagccctcgaacacgacaaggcctacgaccagcagctcaaggccggagacaacccgtacctcaagtacaaccacgccgacgccgagttccaggagcggctcaaagaagatacgtcttttgggggcaacctcgggcgagcagtcttccaggccaaaaagaggcttcttgaacctcttggtctggttgaggaagcggctaagacggctcctggaaagaagaggcctgtagagcagtctcctcaggaaccggactcctccgcgggtattggcaaatcgggtgcacagcccgctaaaaagagactcaatttcggtcagactggcgacacagagtcagtcccagaccctcaaccaatcggagaacctcccgcagccccctcaggtgtgggatctcttacaatggcttcaggtggtggcgcaccagtggcagacaataacgaaggtgccgatggagtgggtagttcctcgggaaattggcattgcgattcccaatggctgggggacagagtcatcaccaccagcacccgaacctgggccctgcccacctacaacaaccacctctacaaacaaatttccagccaatcaggagcctcgaacgacaatcactactttggctacagcaccccttgggggtattttgacttcaacagattccactgccacttttcaccacgtgactggcagcgactcatcaacaacaactggggattccggcccaagagactcagcttcaagctcttcaacatccaggtcaaagaggttacggacaacaatggagtcaagaccatcgccaataaccttaccagcacggtccaggtcttcacggactcagactatcagctcccgtacgtgctcgggtcggctcacgagggctgcctcccgccgttcccagcggacgttttcatgattcctcagtacgggtatctgacgcttaatgatggaagccaggccgtgggtcgttcgtccttttactgcctggaatatttcccgtcgcaaatgctaagaacgggtaacaacttccagttcagctacgagtttgagaacgtacctttccatagcagctacgctcacagccaaagcctggaccgactaatgaatccactcatcgaccaatacttgtactatctctcaaagactattaacggttctggacagaatcaacaaacgctaaaattcagtgtggccggacccagcaacatggctgtccagggaagaaactacatacctggacccagctaccgacaacaacgtgtctcaaccactgtgactcaaaacaacaacagcgaatttgcttggcctggagcttcttcttgggctctcaatggacgtaatagcttgatgaatcctggacctgctatggccagccacaaagaaggagaggaccgtttctttcctttgtctggatctttaatttttggcaaacaaggaactggaagagacaacgtggatgcggacaaagtcatgataaccaacgaagaagaaattaaaactactaacccggtagcaacggagtcctatggacaagtggccacaaaccaccagagtgcccaagcacaggcgcagaccggctgggttcaaaaccaaggaatacttccgggtatggtttggcaggacagagatgtgtacctgcaaggacccatttgggccaaaattcctcacacggacggcaactttcacccttctccgctgatgggagggtttggaatgaaacacccgcctcctcagatcctcatcaaaaacacacctgtacctgcggatcctccaacggccttcaacaaggacaagctgaactctttcatcacccagtattctactggccaagtcagcgtggagatcgagtgggagctgcagaaggaaaacagcaagcgctggaaccccgagatccagtacacctccaactactacaaatctacaagtgtggactttgctgttaatacagaaggcgtgtactctgaaccccgccccattggcacccgttacctcacccgtaatctgtaa

SEQ ID NO: 384 - protein, 734 aa, synthetic construct
  REGION 1..734: note = Description of Artificial Sequence: Synthetic polypeptide
MAADGYLPDWLEDNLSEGIREWWALKPGVPQPKANQQHQDNRRGLVLPGYKYLGPGNGLDKGEPVNEADAAALEHDKAYDQQLKAGDNPYLKYNHADAEFQERLKEDTSFGGNLGRAVFQAKKRLLEPLGLVEEAAKTAPGKKRPVEQSPQEPDSSAGIGKSGAQPAKKRLNFGQTGDTESVPDPQPIGEPPAAPSGVGSLTMASGGGAPVADNNEGADGVGSSSGNWHCDSQWLGDRVITTSTRTWALPTYNNHLYKQISSQSGASNDNHYFGYSTPWGYFDFNRFHCHFSPRDWQRLINNNWGFRPKRLSFKLFNIQVKEVTDNNGVKTIANNLTSTVQVFTDSDYQLPYVLGSAHEGCLPPFPADVFMIPQYGYLTLNDGSQAVGRSSFYCLEYFPSQMLRTGNNFQFSYEFENVPFHSSYAHSQSLDRLMNPLIDQYLYYLSKTINGSGQNQQTLKFSVAGPSNMAVQGRNYIPGPSYRQQRVSTTVTQNNNSEFAWPGASSWALNGRNSLMNPGPAMASHKEGEDRFFPLSGSLIFGKQGTGRDNVDADKVMITNEEEIKTTNPVATESYGQVATNHQSAQAQAQTGWVQNQGILPGMVWQDRDVYLQGPIWAKIPHTDGNFHPSPLMGGFGMKHPPPQILIKNTPVPADPPTAFNKDKLNSFITQYSTGQVSVEIEWELQKENSKRWNPEIQYTSNYYKSTSVDFAVNTEGVYSEPRPIGTRYLTRNL

SEQ ID NO: 385 - DNA, 2217 bp, synthetic construct
  misc_feature 1..2217: note = Description of Artificial Sequence: Synthetic polynucleotide
  source 1..2217: mol_type = other DNA
atggctgccgatggttatcttccagattggctcgaggacaacctctctgagggcattcgcgagtggtgggcgctgaaacctggagccccgaagcccaaagccaaccagcaaaagcaggacgacggccggggtctggtgcttcctggctacaagtacctcggacccttcaacggactcgacaagggggagcccgtcaacgcggcggacgcagcggccctcgagcacgacaaggcctacgaccagcagctgcaggcgggtgacaatccgtacctgcggtataaccacgccgacgccgagtttcaggagcgtctgcaagaagatacgtcttttgggggcaacctcgggcgagcagtcttccaggccaagaagcgggttctcgaacctctcggtctggttgaggaaggcgctaagacggctcctggaaagaagagaccggtagagccatcaccccagcgttctccagactcctctacgggcatcggcaagaaaggccaacagcccgccagaaaaagactcaattttggtcagactggcgactcagagtcagttccagaccctcaacctctcggagaacctccagcagcgccctctggtgtgggacctaatacaatggctgcaggcggtggcgcaccaatggcagacaataacgaaggcgccgacggagtgggtagttcctcgggaaattggcattgcgattccacatggctgggcgacagagtcatcaccaccagcacccgaacctgggccctgcccacctacaacaaccacctctacaagcaaatctccaacgggacatcgggaggagccaccaacgacaacacctacttcggctacagcaccccctgggggtattttgactttaacagattccactgccacttttcaccacgtgactggcagcgactcatcaacaacaactggggattccggcccaagagactcagcttcaagctcttcaacatccaggtcaaggaggtcacgcagaatgaaggcaccaagaccatcgccaataacctcaccagcaccatccaggtgtttacggactcggagtaccagctgccgtacgttctcggctctgcccaccagggctgcctgcctccgttcccggcggacgtgttcatgattccccagtacggctacctaacactcaacaacggtagtcaggccgtgggacgctcctccttctactgcctggaatactttccttcgcagatgctgagaaccggcaacaacttccagtttacttacaccttcgaggacgtgcctttccacagcagctacgcccacagccagagcttggaccggctgatgaatcctctgattgaccagtacctgtactacttgtctcggactcaaacaacaggaggcacggcaaatacgcagactctgggcttcagccaaggtgggcctaatacaatggccaatcaggcaaagaactggctgccaggaccctgttaccgccaacaacgcgtctcaacgacaaccgggcaaaacaacaatagcaactttgcctggactgctgggaccaaataccatctgaatggaagaaattcattggctaatcctggcatcgctatggcaacacacaaagacgacgaggagcgtttttttcccagtaacgggatcctgatttttggcaaacaaaatgctgccagagacaatgcggattacagcgatgtcatgctcaccagcgaggaagaaatcaaaaccactaaccctgtggctacagaggaatacggtatcgtggcagataacttgcagcagcaaaacacggctcctcaaattggaactgtcaacagccagggggccttacccggtatggtctggcagaaccgggacgtgtacctgcagggtcccatctgggccaagattcctcacacggacggcaacttccacccctctcccctcatgggtggattcggacttaaacatcctccgcctcagatcctgatcaagaacacgcctgtacctgcggatcctccgaccaccttcaaccagtcaaagctgaactctttcatcacgcaatacagcaccggacaggtcagcgtggaaattgaatgggagctgcagaaggaaaacagcaagcgctggaaccccgagatccagtacacctccaactactacaaatctacaagtgtggactttgctgttaatacagaaggcgtgtactctgaaccccgccccattggcacccgttacctcacccgtaatctgtaa

SEQ ID NO: 386 - protein, 738 aa, synthetic construct; identical to SEQ ID NO: 132
  REGION 1..738: note = Description of Artificial Sequence: Synthetic polypeptide

SEQ ID NO: 387 - DNA, 2211 bp, synthetic construct
  misc_feature 1..2211: note = Description of Artificial Sequence: Synthetic polynucleotide
  source 1..2211: mol_type = other DNA
atggctgctgacggttatcttccagattggctcgaggacaacctttctgaaggcattcgagagtggtgggcgctgcaacctggagcccctaaacccaaggcaaatcaacaacatcaggacaacgctcggggtcttgtgcttccgggttacaaatacctcggacccggcaacggactcgacaagggggaacccgtcaacgcagcggacgcggcagccctcgagcacgacaaggcctacgaccagcagctcaaggccggtgacaacccctacctcaagtacaaccacgccgacgccgagttccaggagcggctcaaagaagatacgtcttttgggggcaacctcgggcgagcagtcttccaggccaaaaagaggcttcttgaacctcttggtctggttgaggaagcggctaagacggctcctggaaagaagaggcctgtagatcagtctcctcaggaaccggactcatcatctggtgttggcaaatcgggcaaacagcctgccagaaaaagactaaatttcggtcagactggcgactcagagtcagtcccagaccctcaacctctcggagaaccaccagcagcccccacaagtttgggatctaatacaatggcttcaggcggtggcgcaccaatggcagacaataacgagggtgccgatggagtgggtaattcctcaggaaattggcattgcgattcccaatggctgggcgacagagtcatcaccaccagcaccagaacctgggccctgcccacttacaacaaccatctctacaagcaaatctccagccaatcaggagcttcaaacgacaaccactactttggctacagcaccccttgggggtattttgactttaacagattccactgccacttctcaccacgtgactggcagcgactcattaacaacaactggggattccggcccaagaaactcagcttcaagctcttcaacatccaagttaaagaggtcacgcagaacgatggcacgacgactattgccaataaccttaccagcacggttcaggtgtttacggactcggagtatcagctcccgtacgtgctcgggtcggcgcaccaaggctgtctcccgccgtttccagcggacgtcttcatggtccctcagtatggatacctcaccctgaacaacggaagtcaagcggtgggacgctcatccttttactgcctggagtacttcccttcgcagatgctaaggactggaaataacttccaattcagctataccttcgaggatgtaccttttcacagcagctacgctcacagccagagtttggatcgcttgatgaatcctcttattgatcagtatctgtactacctgaacagaacgcaaggaacaacctctggaacaaccaaccaatcacggctgctttttagccaggctgggcctcagtctatgtctttgcaggccagaaattggctacctgggccctgctaccggcaacagagactttcaaagactgctaacgacaacaacaacagtaactttccttggacagcggccagcaaatatcatctcaatggccgcgactcgctggtgaatccaggaccagctatggccagtcacaaggacgatgaagaaaaatttttccctatgcacggcaatctaatatttggcaaagaagggacaacggcaagtaacgcagaattagataatgtaatgattacggatgaagaagagattcgtaccaccaatcctgtggcaacagagcagtatggaactgtggcaaataacttgcagagctcaaatacagctcccacgactagaactgtcaatgatcagggggccttacctggcatggtgtggcaagatcgtgacgtgtaccttcaaggacctatctgggcaaagattcctcacacggatggacactttcatccttctcctctgatgggaggctttggactgaaacatccgcctcctcaaatcatgatcaaaaatactccggtaccggcaaatcctccgacgactttcagcccggccaagtttgcttcatttatcactcagtactccactggacaggtcagcgtggaaattgagtgggagctacagaaagaaaacagcaaacgttggaatccagagattcagtacacttccaactacaacaagtctgttaatgtggactttactgtagacactaatggtgtttatagtgaacctcgccccattggcacccgttaccttacccgtcccctgtaa

SEQ ID NO: 388 - protein, 736 aa, synthetic construct; identical to SEQ ID NO: 358
  REGION 1..736: note = Description of Artificial Sequence: Synthetic polypeptide

SEQ ID NO: 389 - DNA, 2211 bp, synthetic construct; identical to SEQ ID NO: 357
  misc_feature 1..2211: note = Description of Artificial Sequence: Synthetic polynucleotide
  source 1..2211: mol_type = other DNA

SEQ ID NO: 390 - protein, 736 aa, synthetic construct; identical to SEQ ID NO: 358
  REGION 1..736: note = Description of Artificial Sequence: Synthetic polypeptide

SEQ ID NO: 391 - DNA, 2211 bp, synthetic construct
  misc_feature 1..2211: note = Description of Artificial Sequence: Synthetic polynucleotide
  source 1..2211: mol_type = other DNA
atggctgctgacggttatcttccagattggctcgaggacaacctttctgaaggcattcgtgagtggtgggctctgaaacctggagtccctcaacccaaagcgaaccaacaacaccaggacaaccgtcggggtcttgtgcttccgggttacaaatacctcggacccggtaacggactcgacaaaggagagcccgtcaacgcggcggatgcagcggccctcgagcacgacaaggcctacgaccagcagctcaaagcgggtgacaatccgtacctgcggtataaccacgccgacgccgagtttcaggagcgtctgcaagaagatacgtcttttgggggcaacctcgggcgagcagtcttccaggccaagaagagggttctcgaaccttttggtctggttgaggaaggtgctaagacggctcctggaaagaaacgtccggtagagcagtcgccacaagagccagactcctcctcgggcatcggcaagacaggccagcagcccgctaaaaagagactcaattttggtcagactggcgactcagagtcagtccccgacccacaacctctcggagaacctccagcaacccccgctgctgtgggacctactacaatggcttcaggcggtggcgcaccaatggcagacaataacgaaggcgccgacggagtgggtaatgcctcaggaaattggcattgcgattccacatggctgggcgacagagtcatcaccaccagcacccgcacctgggccttgcccacctacaataaccacctctacaagcaaatctccagtgcttcaacgggggccagcaacgacaaccactacttcggctacagcaccccctgggggtattttgatttcaacagattccactgccatttctcaccacgtgactggcagcgactcatcaacaacaattggggattccggcccaagagactcaacttcaagctcttcaacatccaagtcaaggaggtcacgacgaatgatggcgtcacgaccatcgctaataaccttaccagcacggttcaagtcttctcggactcggagtaccagcttccgtacgtcctcggctctgcgcaccagggctgcctccctccgttcccggcggacgtgttcatgattccgcaatacggctacctgacgctcaacaatggcagccaagccgtgggacgttcatccttttactgcctggaatatttcccttctcagatgctgagaacgggcaacaactttaccttcagctacacctttgaggaagtgcctttccacagcagctacgcgcacagccagagcctggaccggctgatgaatcctctcatcgaccaatacctgtattacctgaacagaactcaaaatcagtccggaagtgcccaaaacaaggacttgctgtttagccgtgggtctccagctggcatgtctgttcagcccaaaaactggctacctggaccctgttatcggcagcagcgcgtttctaaaacaaaaacagacaacaacaacagcaattttacctggactggtgcttcaaaatataacctcaatgggcgtgaatccatcatcaaccctggcactgctatggcctcacacaaagacgacgaagacaagttctttcccatgagcggtgtcatgatttttggaaaagagagcgccggagcttcaaacactgcattggacaatgtcatgattacagacgaagaggaaattaaagccactaaccctgtggccaccgaaagatttgggaccgtggcagtcaatttccagagcagcagcacagaccctgcgaccggagatgtgcatgttatgggagccttacctggaatggtgtggcaagacagagacgtatacctgcagggtcctatttgggccaaaattcctcacacggatggacactttcacccgtctcctctcatgggcggctttggacttaagcacccgcctcctcagatcctcatcaaaaacacgcctgttcctgcgaatcctccggcagagttttcggctacaaagtttgcttcattcatcacccagtattccacaggacaagtgagcgtggagattgaatgggagctgcagaaagaaaacagcaaacgctggaatcccgaagtgcagtatacatctaactatgcaaaatctgccaacgttgatttcactgtggacaacaatggactttatactgagcctcgccccattggcacccgttacctcacccgtcccctgtaa

SEQ ID NO: 392 - protein, 736 aa, synthetic construct
  REGION 1..736: note = Description of Artificial Sequence: Synthetic polypeptide
MAADGYLPDWLEDNLSEGIREWWALKPGVPQPKANQQHQDNRRGLVLPGYKYLGPGNGLDKGEPVNAADAAALEHDKAYDQQLKAGDNPYLRYNHADAEFQERLQEDTSFGGNLGRAVFQAKKRVLEPFGLVEEGAKTAPGKKRPVEQSPQEPDSSSGIGKTGQQPAKKRLNFGQTGDSESVPDPQPLGEPPATPAAVGPTTMASGGGAPMADNNEGADGVGNASGNWHCDSTWLGDRVITTSTRTWALPTYNNHLYKQISSASTGASNDNHYFGYSTPWGYFDFNRFHCHFSPRDWQRLINNNWGFRPKRLNFKLFNIQVKEVTTNDGVTTIANNLTSTVQVFSDSEYQLPYVLGSAHQGCLPPFPADVFMIPQYGYLTLNNGSQAVGRSSFYCLEYFPSQMLRTGNNFTFSYTFEEVPFHSSYAHSQSLDRLMNPLIDQYLYYLNRTQNQSGSAQNKDLLFSRGSPAGMSVQPKNWLPGPCYRQQRVSKTKTDNNNSNFTWTGASKYNLNGRESIINPGTAMASHKDDEDKFFPMSGVMIFGKESAGASNTALDNVMITDEEEIKATNPVATERFGTVAVNFQSSSTDPATGDVHVMGALPGMVWQDRDVYLQGPIWAKIPHTDGHFHPSPLMGGFGLKHPPPQILIKNTPVPANPPAEFSATKFASFITQYSTGQVSVEIEWELQKENSKRWNPEVQYTSNYAKSANVDFTVDNNGLYTEPRPIGTRYLTRPL

SEQ ID NO: 393 - DNA, 2217 bp, synthetic construct
  misc_feature 1..2217: note = Description of Artificial Sequence: Synthetic polynucleotide
  source 1..2217: mol_type = other DNA
atggctgccgatggttatcttccagattggctcgaggacaacctctctgagggcattcgcgagtggtgggacttgaaacctggagccccgaaacccaaagccaaccagcaaaagcaggacgacggccggggtctggtgcttcctggctacaagtacctcggacccttcaacggactcgacaagggggagcccgtcaacgcggcggatgcaacggccctcgagcacgacaaggcctacgaccagcagctgcaggcgggtgacaatccgtacctgcggtataaccacgccgacgccgagtttcaggagcgtctgcaagaagatacgtcttttgggggcaacctcgggcgagcagtcttccaggccaagaagcgggttctcgaacctctcggtctggttgaggaaggcgctaagacggctcctggaaagaagagaccggtagagccatcaccccagcgttctccagactcctctacgggcatcggcaagaaaggccaacagcccgccagaaaaagactcaattttggtcagactggcgactcagagtcagttccagaccctcaacctctcggagaaccaccagcagcccccacaagtttgggatctaatacaatggcttcaggcggtggcgcaccaatggcagacaataacgagggtgccgatggagtgggtaattcctcaggaaattggcattgcgattcccaatggctgggcgacagagtcatcaccaccagcacccgcacctgggccttgcccacctacaataaccacctctacaagcaaatctccagtgcttcaacgggggccagcaacgacaaccactacttcggctacagcaccccctgggggtattttgactttaaccgcttccactgccacttctcgccaagagactggcaaagactcatcaacaacaattggggattccggcccaagagactcaacttcaaactcttcaacatccaagtcaaggaggtcacgacgaatgatggcgtcacgaccatcgccaataacctcaccagcaccatccaggtgtttacggactcggagtaccagctgccgtacgttctcggctctgcccaccagggctgcctgcctccgttcccggcggacgtgttcatgattccccagtatggatacctcaccctgaacaacggaagtcaagcggtgggacgctcatccttttactgcctggagtacttcccttcgcagatgctaaggactggaaataacttccaattcagctataccttcgaggatgtaccttttcacagcagctacgctcacagccagagtttggatcgcttgatgaatcctcttattgatcagtatctgtactacctgaacagaacgcaaggaacaacctctggaacaaccaaccaatcacggctgctttttagccaggctgggcctcagtctatgtctttgcaggccagaaattggctacctgggccctgctaccggcaacagagactttcaaagactgctaacgacaacaacaacagtaactttccttggacagcagccagcaaatatcatctcaatggccgcgactcgctggtgaatccaggaccagctatggccagtcacaaggacgatgaagaaaaatttttccctatgcacggcaatctaatatttggcaaagaagggacaacggcaagtaacgcagaattagataatgtaatgattacggatgaagaagagattcgtaccaccaatcctgtggcaacagagcagtatggaactgtggcaaataacttgcagagctcaaatacagctcccacgactagaactgtcaatgatcagggggccttacctggcatggtgtggcaagatcgtgacgtgtaccttcaggggcccatctgggcaaagattccacacacggacggacattttcacccctctcccctcatgggtggattcggacttaaacaccctcctccgcagattctcatcaagaacaccccggtacctgcgaatccttcgaccaccttcagtgcggcaaagtttgcttccttcatcacacagtactccacgggacaggtcagcgtggagatcgagtgggagctgcagaaggaaaacagcaagcgctggaacccggagatccagtacacttccaactattacaagtctaataatgttgaatttgctgttaatactgaaggtgtatatagtgaaccccgccccattggcaccagatacctgactcgtaatctgtaa

SEQ ID NO: 394 - protein, 738 aa, synthetic construct
  REGION 1..738: note = Description of Artificial Sequence: Synthetic polypeptide
MAADGYLPDWLEDNLSEGIREWWDLKPGAPKPKANQQKQDDGRGLVLPGYKYLGPFNGLDKGEPVNAADATALEHDKAYDQQLQAGDNPYLRYNHADAEFQERLQEDTSFGGNLGRAVFQAKKRVLEPLGLVEEGAKTAPGKKRPVEPSPQRSPDSSTGIGKKGQQPARKRLNFGQTGDSESVPDPQPLGEPPAAPTSLGSNTMASGGGAPMADNNEGADGVGNSSGNWHCDSQWLGDRVITTSTRTWALPTYNNHLYKQISSASTGASNDNHYFGYSTPWGYFDFNRFHCHFSPRDWQRLINNNWGFRPKRLNFKLFNIQVKEVTTNDGVTTIANNLTSTIQVFTDSEYQLPYVLGSAHQGCLPPFPADVFMIPQYGYLTLNNGSQAVGRSSFYCLEYFPSQMLRTGNNFQFSYTFEDVPFHSSYAHSQSLDRLMNPLIDQYLYYLNRTQGTTSGTTNQSRLLFSQAGPQSMSLQARNWLPGPCYRQQRLSKTANDNNNSNFPWTAASKYHLNGRDSLVNPGPAMASHKDDEEKFFPMHGNLIFGKEGTTASNAELDNVMITDEEEIRTTNPVATEQYGTVANNLQSSNTAPTTRTVNDQGALPGMVWQDRDVYLQGPIWAKIPHTDGHFHPSPLMGGFGLKHPPPQILIKNTPVPANPSTTFSAAKFASFITQYSTGQVSVEIEWELQKENSKRWNPEIQYTSNYYKSNNVEFAVNTEGVYSEPRPIGTRYLTRNL

SEQ ID NO: 395 - DNA, 2208 bp, synthetic construct
  misc_feature 1..2208: note = Description of Artificial Sequence: Synthetic polynucleotide
  source 1..2208: mol_type = other DNA
atggctgccgatggttatcttccagattggctcgaggacaaccttagtgaaggaattcgcgagtggtgggacttgaaacctggagccccgaagcccaaagccaaccagcaaaagcaggacgacggccggggtctggtgcttcctggctacaagtacctcggacccttcaacggactcgacaagggggagcccgtcaacgcggcggacgcagcggccctcgagcacgacaaggcctacgaccagcagctcaaagcgggtgacaatccgtacctgcggtataaccacgccgacgccgagtttcaggagcgtctgcaagaagatacgtcttttgggggcaacctcgggcgagcagtcttccaggccaagaagcgggttctcgaacctctcggtctggttgaggaaggtgctaagacggctcctggaaagaaacgtccggtagagcagtcgccacaagagccagactcctcctcgggcattggcaagacaggccagcagcccgctaaaaagagactcaattttggtcagactggcgactcagagtcagtccccgacccacaacctctcggagaacctccagcaacccccgctgctgtgggacctactacaatggcttcaggcggtggcgcaccaatggcagacaataacgaaggcgccgacggagtgggtaatgcctcaggaaattggcattgcgattccacatggctgggcgacagagtcatcaccaccagcacccgaacctgggccctgcccacctacaacaaccacctctacaaacaaatttccagccaatcaggagcctcgaacgacaatcactactttggctacagcaccccttgggggtattttgatttcaacagattccactgccacttttcaccacgtgactggcagcgactcatcaacaacaattggggattccggcccaagagactcagcttcaagctcttcaacatccaggtcaaggaggtcacgcagaatgaaggcaccaagaccatcgccaataaccttaccagcacggttcaagtgtttacggactcggagtatcagctcccgtacgtgctcggctcggcgcatcaaggatgcctcccgccgttcccagcagacgtcttcatggtgccacagtatggatacctcaccctgaacaacgggagtcaggcagtaggacgctcttcattttactgcctggagtactttccttctcagatgctgcgtaccggaaacaactttaccttcagctacacttttgaggacgttcctttccacagcagctacgctcacagccagagtctggaccgtctcatgaatcctctgattgaccagtacctgtattacttgagcagaacaaacactccaagtggaaccaccacgcagtcaaggcttcagttttctcaggccggagcgagtgacattcgggaccagtctaggaactggcttcctggaccctgttaccgccagcagcgagtatcaaagacatctgcggataacaacaacagtgaatactcgtggactggagctaccaagtaccacctcaatggcagagactctctggtgaatccgggcccggccatggcaagccacaaggactatgaagaaaagttttttcctcagagcggggttctcatctttgggaagcaaggctcagagaaaacaaatgtggacattgaaaaggtcatgattacagacgaagaggaaatcaggacaaccaatcccgtggctacggagcagtatggttctgtatctaccaacctccagagaggcaacagacaagcagctaccgcagatgtcaacacacaaggcgttcttccaggcatggtctggcaggacagagatgtgtaccttcaggggcccatctgggcaaagattccacacacggacggacattttcacccgtctccgctgatgggcggctttggcctgaaacatcctccgcctcagatcctgatcaagaacacgcctgtacctgcggatcctccgaccaccttcaaccagtcaaagctgaactctttcatcactcagtattctactggccaagtcagcgtggagatcgagtgggagctgcagaaggaaaacagcaagcgctggaaccccgagatccagtacacctccaactactacaaatctacaagtgtggactttgctgttaatacagaaggcgtgtactctgaaccccgccccattggcacccgttacctcacccgtaatctgtaa

SEQ ID NO: 396 - protein, 735 aa, synthetic construct
  REGION 1..735: note = Description of Artificial Sequence: Synthetic polypeptide
MAADGYLPDWLEDNLSEGIREWWDLKPGAPKPKANQQKQDDGRGLVLPGYKYLGPFNGLDKGEPVNAADAAALEHDKAYDQQLKAGDNPYLRYNHADAEFQERLQEDTSFGGNLGRAVFQAKKRVLEPLGLVEEGAKTAPGKKRPVEQSPQEPDSSSGIGKTGQQPAKKRLNFGQTGDSESVPDPQPLGEPPATPAAVGPTTMASGGGAPMADNNEGADGVGNASGNWHCDSTWLGDRVITTSTRTWALPTYNNHLYKQISSQSGASNDNHYFGYSTPWGYFDFNRFHCHFSPRDWQRLINNNWGFRPKRLSFKLFNIQVKEVTQNEGTKTIANNLTSTVQVFTDSEYQLPYVLGSAHQGCLPPFPADVFMVPQYGYLTLNNGSQAVGRSSFYCLEYFPSQMLRTGNNFTFSYTFEDVPFHSSYAHSQSLDRLMNPLIDQYLYYLSRTNTPSGTTTQSRLQFSQAGASDIRDQSRNWLPGPCYRQQRVSKTSADNNNSEYSWTGATKYHLNGRDSLVNPGPAMASHKDYEEKFFPQSGVLIFGKQGSEKTNVDIEKVMITDEEEIRTTNPVATEQYGSVSTNLQRGNRQAATADVNTQGVLPGMVWQDRDVYLQGPIWAKIPHTDGHFHPSPLMGGFGLKHPPPQILIKNTPVPADPPTTFNQSKLNSFITQYSTGQVSVEIEWELQKENSKRWNPEIQYTSNYYKSTSVDFAVNTEGVYSEPRPIGTRYLTRNL

SEQ ID NO: 397 - DNA, 2214 bp, synthetic construct
  misc_feature 1..2214: note = Description of Artificial Sequence: Synthetic polynucleotide
  source 1..2214: mol_type = other DNA
atggctgccgatggttatcttccagattggctcgaggacaacctctctgagggcattcgcgagtggtgggacttgaaacctggagccccgaaacccaaagccaaccagcaaaagcaggacgacggccggggtctggtgcttcctggctacaagtacctcggacccttcaacggactcgacaagggggagcccgtcaacgcggcggatgcagcggccctcgagcacgacaaggcctacgaccagcagctcaaagcgggtgacaatccgtacctgcggtataaccacgccgacgccgagtttcaggagcgtctgcaagaagatacgtcttttgggggcaacctcgggcgagcagtcttccaggccaagaagagggttctcgaaccttttggtctggttgaggaaggtgctaagacggctcctggaaagaaacgtccggtagagcagtcgccacaagagccagactcctcctcgggcattggcaagacaggccagcagcctgcaagaaaaagattgaattttggtcagactggagacgcagactcagtacctgacccccagcctctcggacagccaccagcagccccctctggtctgggaactaatacgatggctacaggcagtggcgcaccaatggcagacaataacgagggcgccgacggagtgggtaattcctcgggaaattggcattgcgattcccaatggctgggggacagagtcatcaccaccagcacccgaacctgggccctgcccacctacaacaatcacctctacaagcaaatctccaacagcacatctggaggatcttcaaatgacaacgcctacttcggctacagcaccccctgggggtattttgatttcaacagattccactgccatttctcaccacgtgactggcagcgactcatcaacaacaattggggattccggcccaagagactcaacttcaagctcttcaacatccaggtcaaggaggtcacgcagaatgaaggcaccaagaccatcgccaataacctcaccagcaccatccaggtgtttacggactcggagtaccagctgccgtacgttctcggctctgcccaccagggctgcctgcctccgttcccggcggacgtgttcatgattccccagtacggctacctaacactcaacaacggtagtcaggccgtgggacgctcctccttctactgcctggaatactttccttcgcagatgctgagaaccggcaacaacttccagtttacttacaccttcgaggacgtgcctttccacagcagctacgcccacagccagagcttggaccggctgatgaatcctctgattgaccagtacctgtactacttgtctcggactcaaacaacaggaggcacgacaaatacgcagactctgggcttcagccaaggtgggcctaatacaatggccaatcaggcaaagaactggctgccaggaccctgttaccgccagcagcgagtatcaaagacatttgcggataacaacaacagtgaatactcgtggactggagctaccaagtaccacctcaatggcagagactctctggtgaatccgggcccggccatggcaagccacaaggacgatgaagaaaagttttttcctcagagcggggttctcatctttgggaagcaaggctcagagaaaacaaatgtggacattgaaaaggtcatgattacagacgaagaggaaatcaggacaaccaatcccgtggctacggagcagtatggttctgtatctaccaacctccagagaggcaacagacaagcagctaccgcagatgtcaacacacaaggcgttcttccaggcatggtctggcaggacagagatgtgtaccttcaggggcccatctgggcaaagattccacacacggacggacattttcacccctctcccctcatgggtggattcggacttaaacaccctccgcctcagatcctgatcaagaacacgcctgtacccgcggatcctccgaccaccttcaaccagtcaaagctgaactctttcatcacccagtattctactggccaagtcagcgtggagatcgagtgggagctgcagaaggaaaacagcaagcgctggaaccccgagatccagtacacctccaactactacaaatctacaagtgtggactttgctgttaatacagaaggcgtgtactctgaaccccgccccattggcacccgttacctcacccgtaatctgtaa

SEQ ID NO: 398 - protein, 737 aa, synthetic construct
  REGION 1..737: note = Description of Artificial Sequence: Synthetic polypeptide
MAADGYLPDWLEDNLSEGIREWWDLKPGAPKPKANQQKQDDGRGLVLPGYKYLGPFNGLDKGEPVNAADAAALEHDKAYDQQLKAGDNPYLRYNHADAEFQERLQEDTSFGGNLGRAVFQAKKRVLEPFGLVEEGAKTAPGKKRPVEQSPQEPDSSSGIGKTGQQPARKRLNFGQTGDADSVPDPQPLGQPPAAPSGLGTNTMATGSGAPMADNNEGADGVGNSSGNWHCDSQWLGDRVITTSTRTWALPTYNNHLYKQISNSTSGGSSNDNAYFGYSTPWGYFDFNRFHCHFSPRDWQRLINNNWGFRPKRLNFKLFNIQVKEVTQNEGTKTIANNLTSTIQVFTDSEYQLPYVLGSAHQGCLPPFPADVFMIPQYGYLTLNNGSQAVGRSSFYCLEYFPSQMLRTGNNFQFTYTFEDVPFHSSYAHSQSLDRLMNPLIDQYLYYLSRTQTTGGTTNTQTLGFSQGGPNTMANQAKNWLPGPCYRQQRVSKTFADNNNSEYSWTGATKYHLNGRDSLVNPGPAMASHKDDEEKFFPQSGVLIFGKQGSEKTNVDIEKVMITDEEEIRTTNPVATEQYGSVSTNLQRGNRQAATADVNTQGVLPGMVWQDRDVYLQGPIWAKIPHTDGHFHPSPLMGGFGLKHPPPQILIKNTPVPADPPTTFNQSKLNSFITQYSTGQVSVEIEWELQKENSKRWNPEIQYTSNYYKSTSVDFAVNTEGVYSEPRPIGTRYLTRNL

SEQ ID NO: 399 - DNA, 2217 bp, synthetic construct
  misc_feature 1..2217: note = Description of Artificial Sequence: Synthetic polynucleotide
  source 1..2217: mol_type = other DNA
atggctgccgatggttatcttccagattggctcgaggacactctctctgaaggaataagacagtggtgggcgctgaaacctggagccccgaagcccaaagccaaccagcaaaagcaggacgacggccggggtctggtgcttcctggctacaagtacctcggacccttcaacggactcgacaagggggagcccgtcaacgcggcggatgcagcggccctcgagcacgacaaggcctacgaccagcagctcaaagcgggtgacaatccgtacctgcggtataaccacgccgacgccgagtttcaggagcgtctgcaagaagatacgtcttttgggggcaacctcgggcgagcagtcttccaggccaagaagcgggttctcgaacctctcggtctggttgaggaaggcgctaagacggctcctggaaagaagagaccggtagagccatcaccccagcgttctccagactcctctacgggcatcggcaagaaaggccaacagcccgccagaaaaagactcaattttggtcagactggcgactcagagtcagttccagaccctcaacctctcggagaaccaccagcagcccccacaagtttgggatctaatacaatggcttcaggcggtggcgcaccaatggcagacaataacgagggtgccgatggagtgggtaattcctcaggaaattggcattgcgattcccaatggctgggcgacagagtcatcaccaccagcacccgcacctgggccttgcccacctacaataaccacctctacaagcaaatctccagtgcttcaacgggggccagcaacgacaaccactacttcggctacagcaccccctgggggtattttgactttaaccgcttccactgccacttctcgccaagagactggcaaagactcatcaacaacaattggggattccggcccaagagactcaacttcaaactcttcaacatccaagtcaaggaggtcacgacgaatgatggcgtcacgaccatcgccaataacctcaccagcaccatccaggtgtttacggactcggagtaccagctgccgtacgttctcggctctgcccaccagggctgcctgcctccgttcccggcggacgtgttcatgattccccagtatggatacctcaccctgaacaacggaagtcaagcggtgggacgctcatccttttactgcctggagtacttcccttcgcagatgctaaggactggaaataacttccaattcagctataccttcgaggatgtaccttttcacagcagctacgctcacagccagagtttggatcgcttgatgaatcctcttattgatcagtatctgtactacctgaacagaacgcaaggaacaacctctggaacaaccaaccaatcacggctgctttttagccaggctgggcctcagtctatgtctttgcaggccagaaattggctacctgggccctgctaccggcaacagagactttcaaagactgctaacgacaacaacaacagtaactttccttggacagcagccagcaaatatcatctcaatggccgcgactcgctggtgaatccaggaccagctatggccagtcacaaggacgatgaagaaaaatttttccctatgcacggcaatctaatatttggcaaagaagggacaacggcaagtaacgcagaattagataatgtaatgattacggatgaagaagagattcgtaccaccaatcctgtggcaacagagcagtatggaactgtggcaaataacttgcagagctcaaatacagctcccacgactagaactgtcaatgatcagggggccttacctggcatggtgtggcaagatcgtgacgtgtaccttcaggggcccatctgggcaaagattccacacacggacggacattttcacccctctcccctcatgggtggattcggacttaaacaccctcctccgcagattctcatcaagaacaccccggtacctgcgaatccttcgaccaccttcagtgcggcaaagtttgcttccttcatcacacagtactccacgggacaggtcagcgtggagatcgagtgggagctgcagaaggaaaacagcaagcgctggaacccggagatccagtacacttccaactattacaagtctaataatgttgaatttgctgttaatactgaaggtgtatatagtgaaccccgccccattggcaccagatacctgactcgtaatctgtaa

SEQ ID NO: 400 - protein, 738 aa, synthetic construct
  REGION 1..738: note = Description of Artificial Sequence: Synthetic polypeptide
MAADGYLPDWLEDTLSEGIRQWWALKPGAPKPKANQQKQDDGRGLVLPGYKYLGPFNGLDKGEPVNAADAAALEHDKAYDQQLKAGDNPYLRYNHADAEFQERLQEDTSFGGNLGRAVFQAKKRVLEPLGLVEEGAKTAPGKKRPVEPSPQRSPDSSTGIGKKGQQPARKRLNFGQTGDSESVPDPQPLGEPPAAPTSLGSNTMASGGGAPMADNNEGADGVGNSSGNWHCDSQWLGDRVITTSTRTWALPTYNNHLYKQISSASTGASNDNHYFGYSTPWGYFDFNRFHCHFSPRDWQRLINNNWGFRPKRLNFKLFNIQVKEVTTNDGVTTIANNLTSTIQVFTDSEYQLPYVLGSAHQGCLPPFPADVFMIPQYGYLTLNNGSQAVGRSSFYCLEYFPSQMLRTGNNFQFSYTFEDVPFHSSYAHSQSLDRLMNPLIDQYLYYLNRTQGTTSGTTNQSRLLFSQAGPQSMSLQARNWLPGPCYRQQRLSKTANDNNNSNFPWTAASKYHLNGRDSLVNPGPAMASHKDDEEKFFPMHGNLIFGKEGTTASNAELDNVMITDEEEIRTTNPVATEQYGTVANNLQSSNTAPTTRTVNDQGALPGMVWQDRDVYLQGPIWAKIPHTDGHFHPSPLMGGFGLKHPPPQILIKNTPVPANPSTTFSAAKFASFITQYSTGQVSVEIEWELQKENSKRWNPEIQYTSNYYKSNNVEFAVNTEGVYSEPRPIGTRYLTRNL

SEQ ID NO: 401 - DNA, 2208 bp, synthetic construct; identical to SEQ ID NO: 37
  misc_feature 1..2208: note = Description of Artificial Sequence: Synthetic polynucleotide
  source 1..2208: mol_type = other DNA

SEQ ID NO: 402 - protein, 735 aa, synthetic construct [sequence omitted]

SEQ ID NO: 403 - DNA, 2208 bp, synthetic construct
  misc_feature 1..2208: note = Description of Artificial Sequence: Synthetic polynucleotide
  source 1..2208: mol_type = other DNA
atggctgccgatggttatcttccagattggctcgaggacaacctctctgagggcattcgcgagtggtgggcgctgaaacctggagccccgaagcccaaagccaaccagcaaaagcaggacgacggccggggtctggtgcttcctggctacaagtacctcggacccttcaacggactcgacaagggggagcccgtcaacgcggcggacgccgcggccctcgagcacgacaaggcctacgaccagcagctgcaggcgggtgacaatccgtacctgcggtataaccacgccgacgccgagtttcaggagcgtctgcaagaagatacgtcttttgggggcaacctcgggcgagcagtcttccaggccaaaaagaggcttcttgaacctcttggtctggttgaggaagcagctaaaacggctcctggaaagaagaggcctgtagagcagtctcctcaggaaccggactcctccgcgggtattggcaaatcgggtgcacagcccgccaaaaagagactcaatttcggtcagactggcgactcagagtcagtcccagaccctcaacctctcggagaaccaccagcagcccccacaagtttgggatctaatacaatggcttcaggcggtggcgcaccaatggcagacaataacgaaggcgccgacggagtgggtaatgcctcaggaaattggcattgcgattccacatggctgggcgacagagtcatcaccaccagcacccgcacctgggccttgcccacctacagcaaccatctctacaagcaaatctccagccaatcaggagcttcaaacgacaacgactactttggctacagcaccccttgggggtattttgatttcaacagattccactgccacttttcaccacgtgactggcaaagactcatcaacaacaactggggattccgacccaagagactcaacttcaagctctttaacattcaagtcaaagaggtcacgcagaatgacggtacgacgacgattgccaataaccttaccagcacggttcaggtgtttactgactcggagtaccagctcccgtacgtcctcggctcggcgcatcaaggatgcctcccgccgttcccagcagacgtcttcatggtgccacagtatggatacctcaccctgaacaacgggagtcaggcagtaggacgctcttcattttactgcctggagtactttccttctcagatgctgcgtaccggaaacaactttaccttcagctacacttttgaggacgttcctttccacagcagctacgctcacagccagagtctggaccgtctcatgaatcctctcatcgaccagtacctgtattacttgagcagaacaaacactccaagtggaaccaccacgcagtcaaggcttcagttttctcaggccggagcgagtgacattcgggaccagtctaggaactggcttcctggaccctgttaccgccagcagcgagtatcaaagacatctgaggataacaacaacagtgaatactcgtggactggagctaccaagtaccacctcaatggcagagactctctggtgaatccgggcccggccatggcaagccacaaggacgatgaagaaaagttttttcctcagagcggggttctcatctttgggaagcaaggctcagagaaaacaaatgtggacattgaaaaggtcatgattacagacgaagaggaaatcaggacaaccaatcccgtggctacggagcagtatggttctgtatctaccaacctccagagaggcaacagacaagcagctaccgcagatgtcaacacacaaggcgttcttccaggcatggtctggcaggacagagatgtgtaccttcaggggcccatctgggcaaagattccacacacggacggacattttcacccctctcccctcatgggtggattcggacttaaacaccctcctccacagattctcatcaagaacaccccggtacctgcgaatccttcgaccaccttcagtgcggcaaagtttgcttccttcatcacacagtactccacgggacaggtcagcgtggagatcgagtgggagctgcagaaggaaaacagcaaacgctggaatcccgaaattcagtacacttccaactacaacaagtctgttaatgtggactttactgtggacactaatggcgtgtattcagagcctcgccccattggcaccagatacctgactcgtaatctgtaa

SEQ ID NO: 404 - protein, 735 aa, synthetic construct
  REGION 1..735: note = Description of Artificial Sequence: Synthetic polypeptide
MAADGYLPDWLEDNLSEGIREWWALKPGAPKPKANQQKQDDGRGLVLPGYKYLGPFNGLDKGEPVNAADAAALEHDKAYDQQLQAGDNPYLRYNHADAEFQERLQEDTSFGGNLGRAVFQAKKRLLEPLGLVEEAAKTAPGKKRPVEQSPQEPDSSAGIGKSGAQPAKKRLNFGQTGDSESVPDPQPLGEPPAAPTSLGSNTMASGGGAPMADNNEGADGVGNASGNWHCDSTWLGDRVITTSTRTWALPTYSNHLYKQISSQSGASNDNDYFGYSTPWGYFDFNRFHCHFSPRDWQRLINNNWGFRPKRLNFKLFNIQVKEVTQNDGTTTIANNLTSTVQVFTDSEYQLPYVLGSAHQGCLPPFPADVFMVPQYGYLTLNNGSQAVGRSSFYCLEYFPSQMLRTGNNFTFSYTFEDVPFHSSYAHSQSLDRLMNPLIDQYLYYLSRTNTPSGTTTQSRLQFSQAGASDIRDQSRNWLPGPCYRQQRVSKTSEDNNNSEYSWTGATKYHLNGRDSLVNPGPAMASHKDDEEKFFPQSGVLIFGKQGSEKTNVDIEKVMITDEEEIRTTNPVATEQYGSVSTNLQRGNRQAATADVNTQGVLPGMVWQDRDVYLQGPIWAKIPHTDGHFHPSPLMGGFGLKHPPPQILIKNTPVPANPSTTFSAAKFASFITQYSTGQVSVEIEWELQKENSKRWNPEIQYTSNYNKSVNVDFTVDTNGVYSEPRPIGTRYLTRNL

SEQ ID NO: 405 - DNA, 2208 bp, synthetic construct
  misc_feature 1..2208: note = Description of Artificial Sequence: Synthetic polynucleotide
  source 1..2208: mol_type = other DNA
atggctgccgatggttatcttccagattggctcgaggacaacctctctgagggcattcgcgagtggtgggcgctgaaacctggagccccgaagcccaaagccaaccagcaaaagcaggacgacggccggggtctggtgcttcctggctacaagtacctcggacccttcaacggactcgacaagggggagcccgtcaacgcggcggacgcagcggccctcgagcacgacaaggcctacgaccagcagctgcaggcgggtgacaatccgtacctgcggtataaccacgccgacgccgagttccaggagcgtctgcaagaagatacgtcttttgggggcaacctcgggcgagcagtcttccaggccaagaagagggttctcgaaccttttggtctggttgaggaaggtgctaagacggctcctggaaagaaacgtccggtagagcagtcgccacaagagccagactcctcctcgggcattggcaagacaggccagcagcccgctaaaaagagactcaattttggtcagactggcgactcagagtcagtcccagaccctcaacctctcggagaaccaccagcagcccccacaagtttgggatctaatacaatggcttcaggcggtggcgcaccaatggcagacaataacgagggcgccgacggagtgggtaattcctcgggaaattggcattgcgattccacatggatgggcgacagagtcatcaccaccagcacccgaacctgggccctgcccacctacaacaaccacctctacaaacaaatttccagccaatcaggagcttcaaacgacaaccactactttggctacagcaccccttgggggtattttgactttaacagattccactgccacttttcaccacgtgactggcagcgactcattaacaacaactggggattccggcccaagaaactcaacttcaagctctttaacatccaggtcaaggaggtcacgcagaatgaaggcaccaagaccatcgccaataacctcaccagcaccatccaggtgtttacggactcggagtaccagctgccgtacgttctcggctctgcccaccagggctgcctgcctccgttcccggcggacgtgttcatgattccccagtacggctacctaacactcaacaacggtagtcaggccgtgggacgctcctccttctactgcctggaatactttccttcgcagatgctgagaaccggcaacaacttccagtttacttacaccttcgaggacgtgcctttccacagcagctacgcccacagccagagcttggaccggctgatgaatcctctgattgaccagtacctgtattacttgtctcggactcaaacaacaggaggcacgacaaatacgcagactctgggcttcagccaaggtgggcctaatacaatggccaatcaggcaaagaactggctgcctggaccctgttaccgccagcagcgagtatcaaagacatctgcggataacaacaacagtgaatactcgtggactggagctaccaagtaccacctcaatggcagagactctctggtgaatccgggcccggccatggcaagccacaaggacgatgaagaaaagttttttcctcagagcggggttctcatctttgggaagcaaggctcagagaaaacaaatgtggacattgaaaaggttatgattacagacgaagaggaaatcaggacaaccaatcccgtggctacggagcagtatggttctgtatctaccaacctccagagaggcaacagacaagcagctaccgcagatgtcaacacacagggcgttcttccaggcatggtctggcaggacagagatgtgtaccttcagggtcccatttgggccaaaattcctcacacagatggacactttcacccgtcccctcttatgggcggctttggactcaagaacccgcctcctcagatcctcatcaaaaacacgcctgttcctgcgaatcctccggcagagttttcagctacaaagtttgcttcattcatcacccaatactccacaggacaagtgagtgtggaaattgaatgggagctgcagaaagaaaacagcaagcgctggaatcccgaagtgcagtacacatccaattatgcaaaatctgccaacgttgattttactgtggacactaatggcgtgtattcagagcctcgccccattggcaccagatacctcacccgtaatctgtaa

SEQ ID NO: 406 - protein, 735 aa, synthetic construct
  REGION 1..735: note = Description of Artificial Sequence: Synthetic polypeptide
MAADGYLPDWLEDNLSEGIREWWALKPGAPKPKANQQKQDDGRGLVLPGYKYLGPFNGLDKGEPVNAADAAALEHDKAYDQQLQAGDNPYLRYNHADAEFQERLQEDTSFGGNLGRAVFQAKKRVLEPFGLVEEGAKTAPGKKRPVEQSPQEPDSSSGIGKTGQQPAKKRLNFGQTGDSESVPDPQPLGEPPAAPTSLGSNTMASGGGAPMADNNEGADGVGNSSGNWHCDSTWMGDRVITTSTRTWALPTYNNHLYKQISSQSGASNDNHYFGYSTPWGYFDFNRFHCHFSPRDWQRLINNNWGFRPKKLNFKLFNIQVKEVTQNEGTKTIANNLTSTIQVFTDSEYQLPYVLGSAHQGCLPPFPADVFMIPQYGYLTLNNGSQAVGRSSFYCLEYFPSQMLRTGNNFQFTYTFEDVPFHSSYAHSQSLDRLMNPLIDQYLYYLSRTQTTGGTTNTQTLGFSQGGPNTMANQAKNWLPGPCYRQQRVSKTSADNNNSEYSWTGATKYHLNGRDSLVNPGPAMASHKDDEEKFFPQSGVLIFGKQGSEKTNVDIEKVMITDEEEIRTTNPVATEQYGSVSTNLQRGNRQAATADVNTQGVLPGMVWQDRDVYLQGPIWAKIPHTDGHFHPSPLMGGFGLKNPPPQILIKNTPVPANPPAEFSATKFASFITQYSTGQVSVEIEWELQKENSKRWNPEVQYTSNYAKSANVDFTVDTNGVYSEPRPIGTRYLTRNL

SEQ ID NO: 407 - DNA, 2214 bp, synthetic construct; identical to SEQ ID NO: 397
  misc_feature 1..2214: note = Description of Artificial Sequence: Synthetic polynucleotide
  source 1..2214: mol_type = other DNA

SEQ ID NO: 408 - protein, 737 aa, synthetic construct; identical to SEQ ID NO: 398
  REGION 1..737: note = Description of Artificial Sequence: Synthetic polypeptide

SEQ ID NO: 409 - DNA, 2196 bp, Adeno-associated virus
  source 1..2196: mol_type = unassigned DNA
atggctgctgacggttatcttccagattggctcgaggacaacctctctgagggcattcgcgagtggtgggcgctgaaacctggagccccgcaacccaaagccaaccagcaaaagcaggacgacggccggggtctggtgcttcctggctacaagtacctcggacccttcaacggactcgacaagggggagcccgtcaacgaggcggacgccgcggccctcgagcacgacaaggcctacgaccagcagctcaaagcgggtgacaatccgtacctgcggtataatcacgccgacgccgagtttcaagagcgtctgcaagaagatacgtcctttgggggcaacctcgggcgagcagtcttccaggccaaaaagagggtactcgagcctctgggtctggttgaggaaggcgctaagacggctcctggaaagaagcggccagtagaaccggactccagctcgggcatcggcaagtcaggccagcagcccgcgaaaaagagactgaattttgggcagactggcgactcagagtcagtgcctgacccccaacctctctcagaaccacccgcaggtccctctggtctgggatctggtacaatggctgctggcggtggcgctccaatggcagacaataacgaaggcgccgacggagtgggtaatgtctcaggaaattggcattgcgattccacatggctgggcgaccgagtcatcaccaccagcactcggacctgggccctccccacctacaacaaccacctctacaagcaaatctccaacgggacctcgggaggcagcagcaacgacaacacctactttggctacagcaccccctgggggtattttgactttaacagattccactgccacttttcaccacgtgactggcagcgactcatcaacaacaactgggggttccggcccaagaagctcaacttcaagctcttcaacatccaggtcaaggaggtcacccagaatgaaggcaccaagaccatcgccaataacctcaccagcacggtgcaggtctttacggactcggagtaccagctcccgtacgtgctcggctctgcccaccagggctgcctgcctccgttcccggcggacgtgttcatgattccgcagtacgggtacctgacgctgaacaacgggagccaggccgtggggcgatcctccttctactgcctggagtactttccctcgcagatgctgagaacgggcaacaactttaccttcagctacaccttcgaggacgtgcccttccacagcagctacgcgcacagccagagcctggaccggctgatgaacccgctgattgaccagtacctgtactacctgtctcggactcagaccaacgggaccaatgccacgcagactctgttgtttgctcaggccgggcctcagaacatgtcggctcaggccaagaactggctgcctggtccttgctatcggcagcagcgcgtctctacgacagtgtcgcaaaacaacaacagcaactttacctggaccggggcgaccaagtaccacctgaacggccgagactccctggtgagccccggtgtcgccatggcaacgcacaaggacgacgaggagcgcttcttcccgagcagcggggtcctgatgtttggcaagcagggcgctggaaaggacaatgtcgagtacaccaacgtgatgctcaccagcgaggaggagatcaagaccaccaaccctgtggccacggagcagtacggcgtggtggctgacaatctgcagcagaccaactcagctcccattgtgggggcagtcaacagccagggggccttacccggtatggtctggcagaaccgggacgtgtacctgcagggtcccatctgggccaagatcccgcatacggacggcaactttcacccgtctcctctcatgggcggctttggactgaaacacccgcctccccagatcctgatcaaaaacacgccggtacctgcggatcccccggtgaactttacggacgctaagctggcgagtttcatcacgcagtacagcaccgggcaggtcagcgtggagattgagtgggagctgcagaaggagaacagcaagcgctggaatcccgagattcagtacacttccaattattataaatcagctaatgtggactttgccgtcaatgcagatggtgtatatagtgaaccccgccccattggcactcgttacctcacccgtaatctgtaa

SEQ ID NO: 410 - protein, 731 aa, Adeno-associated virus
MAADGYLPDWLEDNLSEGIREWWALKPGAPQPKANQQKQDDGRGLVLPGYKYLGPFNGLDKGEPVNEADAAALEHDKAYDQQLKAGDNPYLRYNHADAEFQERLQEDTSFGGNLGRAVFQAKKRVLEPLGLVEEGAKTAPGKKRPVEPDSSSGIGKSGQQPAKKRLNFGQTGDSESVPDPQPLSEPPAGPSGLGSGTMAAGGGAPMADNNEGADGVGNVSGNWHCDSTWLGDRVITTSTRTWALPTYNNHLYKQISNGTSGGSSNDNTYFGYSTPWGYFDFNRFHCHFSPRDWQRLINNNWGFRPKKLNFKLFNIQVKEVTQNEGTKTIANNLTSTVQVFTDSEYQLPYVLGSAHQGCLPPFPADVFMIPQYGYLTLNNGSQAVGRSSFYCLEYFPSQMLRTGNNFTFSYTFEDVPFHSSYAHSQSLDRLMNPLIDQYLYYLSRTQTNGTNATQTLLFAQAGPQNMSAQAKNWLPGPCYRQQRVSTTVSQNNNSNFTWTGATKYHLNGRDSLVSPGVAMATHKDDEERFFPSSGVLMFGKQGAGKDNVEYTNVMLTSEEEIKTTNPVATEQYGVVADNLQQTNSAPIVGAVNSQGALPGMVWQNRDVYLQGPIWAKIPHTDGNFHPSPLMGGFGLKHPPPQILIKNTPVPADPPVNFTDAKLASFITQYSTGQVSVEIEWELQKENSKRWNPEIQYTSNYYKSANVDFAVNADGVYSEPRPIGTRYLTRNL

SEQ ID NO: 411 - DNA, 2196 bp, Adeno-associated virus
  source 1..2196: mol_type = unassigned DNA
atggctgctgacggttatcttccagattggctcgaggacaacctctctgagggcattcgcgagtggtgggcgctgaaacctggagccccgcaacccaaagccaaccagcaaaagcaggacgacggccggggtctggtgcttcctggctacaagtacctcggacccttcaacggactcgacaagggggagcccgtcaacgaggcggacgccgcggccctcgagcacgacaaggcctacgaccagcagctcaaagcgggtgacaatccgtacctgcggtataatcacgccgacgccgagtttcaagagcgtctgcaagaagatacgtcctttgggggcaacctcgggcgagcagtcttccaggccaaaaagagggtactcgagcctctgggtctggttgaggaaggcgctaagacggctcctggaaagaagcggccagtagaaccggactccagctcgggcatcggcaagtcaggccggcagcccgcgaaaaagagactgaattttgggcagactggcgactcagagtcagtgcctgacccccaacctctctcagaaccacccgcaggtccctctggtctgggatctggtacaatggctgcaggcggtggcgctccaatggcagacaataacgaaggcgccgacggagtgggtaatgcctcaggaaattggcattgcgattccacatggctgggcgaccgagtcatcaccaccagcactcggacctgggccctccccacctacaacaaccacctctacaagcaaatctccaacgggacctcgggaggcagcagcaacgacaacacctactttggctacagcaccccctgggggtattttgactttaacagattccactgccacttttcaccacgtgactggcagcgactcatcaacaacaactggggattccggcccaagaggctcaacttcaagctcttcaacatccaggtcaaggaggtcacccagaatgaaggcaccaagaccatcgccaataacctcaccagcacggtgcaggtctttacggactcgaagtaccagctcccgtacgtgctcggctctgcccaccagggctgcctgcctccgttcccggcggacgtgttcatgattccgcagtacgggtacctgacgctgaacaacgggagccaggccgtggggcgatcctccttctactgcctggagtactttccctcgcagatgctgagaacgggcaacaactttaccttcagctacaccttcgaggacgtgcccttccacagcagctacgcgcacagccagagcctggaccggctgatgaacccgctgattgaccagtacctgtactacctgtctcggactcagaccaacgggaccaatgccacgcagactctgttgtttgctcaggccgggcctcagaacatgtcggctcaggccaagaactggctgcctggtccttgctatcggcagcagcgcgtctctacgacagtgtcgcaaaacaacaacagcaactttacctggaccggggcgaccaagtaccacctgaacggccgagactccctggtgaaccccggtgtcgccatggcaacgcacaaggacgacgaggagcgcttcttcccgagcagcggggtcctgatgtttggcaagcagggcgctggaaaggacaatgtcgagtacaccaacgtgatgctcaccagcgaggaggagatcaagaccaccaaccctgtggccacggagcagtacggtgtggtggctgacaatctgcagcagaccaactcggctcccattgtgggggcagtcaacagccagggggccttacccggtatggtctggcagaaccgggacgtgtacctgcagggtcccatctgggccaagatcccgcatacggacggcaactttcacccgtctcctctcatgggcggctttggactgaaacacccgcctccccagatcctgatcaaaaacacgccggtacctgcggatcccccggtgaactttacggacgctaagctggcgagtttcatcacgcagtacagcaccgggcaggtcagcgtggagattgagtgggagctgcagaaggagaacagcaagcgctggaatcccgagattcagtacacttccaattattataaatcagctaatgtggactttgccgtcaatgcagatggtgtatatagtgaaccccgccccattggcactcgttacctcacccgtaatctgtaa

SEQ ID NO: 412 - protein, 731 aa, Adeno-associated virus
MAADGYLPDWLEDNLSEGIREWWALKPGAPQPKANQQKQDDGRGLVLPGYKYLGPFNGLDKGEPVNEADAAALEHDKAYDQQLKAGDNPYLRYNHADAEFQERLQEDTSFGGNLGRAVFQAKKRVLEPLGLVEEGAKTAPGKKRPVEPDSSSGIGKSGRQPAKKRLNFGQTGDSESVPDPQPLSEPPAGPSGLGSGTMAAGGGAPMADNNEGADGVGNASGNWHCDSTWLGDRVITTSTRTWALPTYNNHLYKQISNGTSGGSSNDNTYFGYSTPWGYFDFNRFHCHFSPRDWQRLINNNWGFRPKRLNFKLFNIQVKEVTQNEGTKTIANNLTSTVQVFTDSKYQLPYVLGSAHQGCLPPFPADVFMIPQYGYLTLNNGSQAVGRSSFYCLEYFPSQMLRTGNNFTFSYTFEDVPFHSSYAHSQSLDRLMNPLIDQYLYYLSRTQTNGTNATQTLLFAQAGPQNMSAQAKNWLPGPCYRQQRVSTTVSQNNNSNFTWTGATKYHLNGRDSLVNPGVAMATHKDDEERFFPSSGVLMFGKQGAGKDNVEYTNVMLTSEEEIKTTNPVATEQYGVVADNLQQTNSAPIVGAVNSQGALPGMVWQNRDVYLQGPIWAKIPHTDGNFHPSPLMGGFGLKHPPPQILIKNTPVPADPPVNFTDAKLASFITQYSTGQVSVEIEWELQKENSKRWNPEIQYTSNYYKSANVDFAVNADGVYSEPRPIGTRYLTRNL

SEQ ID NO: 413 - DNA, 2196 bp, Adeno-associated virus
  source 1..2196: mol_type = unassigned DNA
atggctgctgacggttatcttccagattggctcgaggacaacctctctgagggcattcgcgagtggtgggcgctgaaacctggagccccgcaacccaaagccaaccagcaaaagcaggacgacggccggggtctggtgcttcctggctacaagtacctcggacccttcaacggactcgacaagggggagcccgtcaacgaggcggacgccgcggccctcgagcacgacaaggcctacgaccagcagctcaaagcgggtgacaatccgtacctgcggtataatcacgccgacgccgagtttcaagagcgtctgcaagaagatacgtcctttgggggcaacctcgggcgagcagtcttccaggccaaaaagagggtactcgagcctctgggtctggttgaggaaggcgctaagacggctcctggaaagaagcggccagtagaaccggactccagctcgggcatcggcaagtcaggccagcagcccgcgaaaaagagactgaattttgggccgactggcgactcagagtcagtgcctgacccccaacctctctcagaaccacctgcaggtccctctggtctgggatctggtacaatggctgcaggcggtggcgctccaatggcagacaataacgaaggcgccgacggagtgggtaatgtctcaggaaattggcattgcgattccacatggctgggcgaccgagtcatcaccaccagcactcggacctgggccctccccacctacaacaaccacctctacaagcaaatctccaacgggacctcgggaggcagcagcaacgacaacacctactttggctacagcaccccctgggggtattttgactttaacagattccactgccacttttcaccacgcgactggcagcgactcatcaacaacaactggggattccggcccaagaagctcaacttcaagctcttcaacatccaggtcaaggaggtcacccagaatgaaggcaccaagaccaccgccaataacctcaccagcacggtgcaggtctttacggactcggagtaccagctcccgtacgtgctcggctctgcccaccagggctgcctgcctccgttcccggcggacgtgttcatgattccgcagtacgggtacctgacgctgaacaacgggagccaggccgtggggcgatcctccttctactgcctggagtactttccctcgcagatgctgagaacgggcaacaactttaccttcagctacaccttcgaggacgtgcccttccacagcagctacgcgcacagccagagcctggaccggctgatgaacccgctgattgaccagtacctgtactacctgtctcggactcagaccaacgggaccaatgccacgcagactctgttgtttgctcaggccgggcctcagaacatgtcggctcaggccaagaactggctgcctggtccttgctatcggcagcagcgcgtctctacggcagtgtcgcaaaacaacaacagcaactttacctggaccggggcgaccaagtaccacctgaacggccgagactccctggtgaaccccggtgtcgccatggcaacgcacaaggacgacgaggagcgcttcttcccgagcagcggggtcctgatgtttggcaagcagggcgctggaaaggacaatgtcgagtacaccaacgtgatgctcaccagcgaggaggagatcaagaccaccaaccctgtggccacggagcagtacggtgtggtggctgacaatctgcagcagaccaactcggctcccattgtgggggcagtcaacagccagggggccttacccggtatggtctggcagaaccgggacgtgtacctgcagggtcccatctgggccaagatcccgcatacggacggcaactttcacccgtctcctctcatgggcggctttggactgaaacacccgcctccccagatcctgatcaaaaacacgccggtacctgcggatcccccggtgaactttacggacgctaagctggcgagtttcatcacgcagtacagcaccgggcaggtcagcgtggagattgagtgggagctgcagaaggagaacagcaagcgctggaatcccgagattcagtacacttccaattattataaatcagctaatgtggactttgccgtcaatgcagatggtgtatatagcgaaccccgccccattggcactcgttacctcacccgtaatctgtaa

SEQ ID NO: 414 - protein, 731 aa, Adeno-associated virus
MAADGYLPDWLEDNLSEGIREWWALKPGAPQPKANQQKQDDGRGLVLPGYKYLGPFNGLDKGEPVNEADAAALEHDKAYDQQLKAGDNPYLRYNHADAEFQERLQEDTSFGGNLGRAVFQAKKRVLEPLGLVEEGAKTAPGKKRPVEPDSSSGIGKSGQQPAKKRLNFGPTGDSESVPDPQPLSEPPAGPSGLGSGTMAAGGGAPMADNNEGADGVGNVSGNWHCDSTWLGDRVITTSTRTWALPTYNNHLYKQISNGTSGGSSNDNTYFGYSTPWGYFDFNRFHCHFSPRDWQRLINNNWGFRPKKLNFKLFNIQVKEVTQNEGTKTTANNLTSTVQVFTDSEYQLPYVLGSAHQGCLPPFPADVFMIPQYGYLTLNNGSQAVGRSSFYCLEYFPSQMLRTGNNFTFSYTFEDVPFHSSYAHSQSLDRLMNPLIDQYLYYLSRTQTNGTNATQTLLFAQAGPQNMSAQAKNWLPGPCYRQQRVSTAVSQNNNSNFTWTGATKYHLNGRDSLVNPGVAMATHKDDEERFFPSSGVLMFGKQGAGKDNVEYTNVMLTSEEEIKTTNPVATEQYGVVADNLQQTNSAPIVGAVNSQGALPGMVWQNRDVYLQGPIWAKIPHTDGNFHPSPLMGGFGLKHPPPQILIKNTPVPADPPVNFTDAKLASFITQYSTGQVSVEIEWELQKENSKRWNPEIQYTSNYYKSANVDFAVNADGVYSEPRPIGTRYLTRNL

SEQ ID NO: 415 - DNA, 4404 bp, Adeno-associated virus
  source 1..4404: mol_type = unassigned DNA
atggctgccgatggttatcttccagattggctcgagggcaacctctctgagggcattcgcgagtggtgggacttgaaacctggagccccgaaacccaaagccaaccagcaaaagcaggacgacggccggggtctggtgcttcctggctacaggtacctcggacccttcaacggactcgacaagggagagccggtcaacgaggcagacgccgcggccctcgagcacgacaaggcctacgacaagcagctcgagcagggggacaacccgtacctcaagtacaaccacgccgacgccgagtttcaggagcgtcttcaagaagatacgtcttttgggggcaacctcgggcgagcagtcttccaggccaagaagcgggttctcgaacctctcggtctggttgaggaaggcgctaagacggctcctggaaagaagagacccatagaatcccccgactcctccacgggcatcggcaagaacggccagccgcccgctaaaaagaagctcaactttgggcagactggcgactcagagtcagtgcccgacccccaacctctcggagaacctcccgccgcgccctcaggtctgggatctggtacaatggctgcaggcggtggcgcaccaatggcagacaataacgaaggcgccgacggagtgggtaatgcctccggaaattggcattgcgattccacatggctgggcgacagagtcatcaccaccagcacccgcacctgggccctgcccacctacaacaaccacctctacaagcagatatcaagtcagagcggggctaccaacgacaaccacttcttcggctacagcaccccctggggctattttgacttcaacagattccactgccacttctcaccacgtgactggcagcgactcatcaacaacaactggggattccggcccagaaagctgcggttcaagttgttcaacatccaggtcaaggaggtcacgacgaacgacggcgttacgaccatcgctaataaccttaccagcacgattcaggtcttctcggactcggagtaccaactgccgtacgtcctcggctctgcgcaccagggctgcctccctccgttccctgcggacgtgttcatgattcctcagtacggatatctgactctaaacaacggcagtcagtctgtgggacgttcctccttctactgcctggagtactttccttctcagatgctgagaacgggcgataactttgaattcagctacacctttgaggaagtgcctttccacagcagctatgcgcacagccagagcctggaccggctgatgaatcccctcatcgaccagtacctgtactacctggcccggacccagagcactacggggtccacaagggagctgcagttccatcaggctgggcccaacaccatggccgagcaatcaaagaactggctgcccggaccctgttatcggcagcagagactgtcaaaaaacatagacagcaacaacaacagtaactttgcctggaccggggccactaaataccatctgaatggtagaaattcattaaccaacccgggcgtagccatggccaccaacaaggacgacgaggaccagttctttcccatcaacggagtgctggtttttggcaaaacgggggctgccaacaagacaacgctggaaaacgtgctaatgaccagcgaggaggagatcaaaaccaccaatcccgtggctacagaagaatacggtgtggtctccagcaacctgcaatcgtctacggccggaccccagacacagactgtcaacagccagggggctctgcccggcatggtctggcagaaccgggacgtgtacctgcagggtcccatctgggccaaaattcctcacacggacggcaactttcacccgtctcccctgatgggcggatttggactcaaacacccgcctcctcaaattctcatcaaaaacaccccggtacctgctaatcctccagaggtgtttactcctgccaagtttgcctcatttatcacgcagtacagcaccggccaggtcagcgtggagatcgagtgggaactgcagaaagaaaacagcaaacgctggaatccagagattcagtacacctcaaattatgccaagtctaataatgtggaatttgctgtcaacaacgaaggggtttatactgagcctcgccccattggcacccgttacctcacccgtaacctgtaaatggctgccgatggttatcttccagattggctcgaggacaacctctctgagggcattcgcgagtggtgggacttgaaacctggagccccgaaacccaaagccaaccagcaaaagcaggacgacggccggggtctggtgcttcctggctacaagtacctcggacccttcaacggactcgacaagggggagcccgtcaacgcggcggacgcagcggccctcgagcacgacaaggcctacgaccagcagctcaaagcgggtgacaatccgtacctgcggtataaccacgccgacgccgagtttcaggagcgtctgcaagaagatacgtcttttgggggcaacctcgggcgagcagtcttccaggccaagaagcgggttctcgaacctctcggtctggttgaggaaggcgctaagacggctcctggaaagaagagaccggtagagccatcaccccagcgttctccagactcctctacgggcatcggcaagaaaggccagcagcccgcgaaaaagagactcaactttgggcagactggcgactcagagtcagtgcccgaccctcaaccaatcggagaaccccccgcaggcccctctggtctgggatctggtacaatggctgcaggcggtggcgctccaatggcagacaataacgaaggcgccgacggagtgggtagttcctcaggaaattggcattgcgattccacatggctgggcgacagagtcatcaccaccagcacccgaacctgggccctccccacctacaacaaccacctctacaagcaaatctccaacgggacttcgggaggaagcaccaacgacaacacctacttcggctacagcaccccctgggggtattttgactttaacagattccactgccacttctcaccacgtgactggcagcgactcatcaacaacaactggggattccggcccaagagactcaacttcaagctcttcaacatccaggtcaaggaggtcacgcagaatgaaggcaccaagaccatcgccaataaccttaccagcacgattcaggtctttacggactcggaataccagctcccgtacgtcctcggctctgcgcaccagggctgcctgcctccgttcccggcggacgtcttcatgattcctcagtacgggtacctgactctgaacaatggcagtcaggccgtgggccgttcctccttctactgcctggagtactttccttctcaaatgctgagaacgggcaacaactttgagttcagctaccagtttgaggacgtgccttttcacagcagctacgcgcacagccaaagcctggaccggctgatgaaccccctcatcgaccagtacctgtactacctgtctcggactcagtccacgggaggtaccgcaggaactcagcagttgctattttctcaggccgggcctaataacatgtcggctcaggccaaaaactggctacccgggccctgctaccggcagcaacgcgtctccacgacactgtcgcaaaataacaacagcaactttgcctggaccggtgccaccaagtatcatctgaatggcagagactctctggtaaatcccggtgtcgctatggcaacccacaaggacgacgaagagcgattttttccgtccagcggagtcttaatgtttgggaaacagggagctggaaaagacaacgtggactatagcagcgttatgctaaccagtgaggaagaaattaaaaccaccaacccagtggccacagaacagtacggcgtggtggccgataacctgcaacagcaaaacgccgctcctattgtaggggccgtcaacagtcaaggagccttacctggcatggtctggcagaaccgggacgtgtacctgcagggtcctatctgggccaagattcctcacacggacggaaactttcatccctcgccgctgatgggaggctttggactgaaacacccgcctcctcagatcctgattaagaatacacctgttcccgcggatcctccaactaccttcagtcaagctaagctggcgtcgttcatcacgcagtacagcaccggacaggtcagcgtggaaattgaatgggagctgcagaaagaaaacagcaaacgctggaacccagagattcaatacacttccaactactacaaatctacaaatgtggactttgctgttaacacagatggcacttattctgagcctcgccccatcggcacccgttacctcacccgtaatctgtaa

SEQ ID NO: 416 - protein, 738 aa, Adeno-associated virus; identical to SEQ ID NO: 34

SEQ ID NO: 417 - DNA, 3129 bp, Adeno-associated virus
  source 1..3129: mol_type = unassigned DNA
gaattcgccctttctacggctgcgtcaactggaccaatgagaactttcccttcaacgattgcgtcgacaagatggtgatctggtgggaggagggcaagatgacggccaaggtcgtggagtccgccaaggccattctcggcggcagcaaagtgcgcgtggaccaaaagtgcaagtcgtccgcccagatcgaccccacccccgtgatcgtcacctccaacaccaacatgtgcgccgtgattgacgggaacagcaccaccttcgagcaccagcagccgttgcaggaccggatgttcaagtttgaactcacccgccgtctggagcacgactttggcaaggtgacaaagcaggaagtcagagagttcttccgctgggcgcaggatcacgtgaccgaggtggcgcacgagttctacgtcagaaagggtggagccaacaagagacccgcccccgatgacgcggataaaagcgagcccaagcgggcctgcccctcagtcgcggatccatcgacgtcagacgcggaaggagctccggtggactttgccgacaggtaccaaaacaaatgttctcgtcacgcgggcatgcttcagatgctgtttccctgcaaaacatgcgagagaatgaatcagaatttcaacatttgcttcacgcacgggaccagagactgttcagaatgtttccccggcgtgtcagaatctcaaccggtcgtcagaaaaaagacgtatcggaaactctgtgcgattcatcatctgctgggggcgggcacccgagattgcttgctcggcctgcgatctggtcaacgtggacctagatgactgtgtttctgagcaataaatgacttaaaccaggtatggctgccgatggttatcttccagattggctcgaggacaacctctctgagggcattcgcgagtggtgggacttgaaacctggagccccgaaacccaaagccaaccagcaaaagcaggacgacggccggggtctggtgcttcctggctacaagtacctcggacccttcaacggactcgacaagggggagcccgtcaacgcggcggacgcagcggccctcgagcacgacaaggcctacgaccagcagctcaaagcgggtgacaatccgtacctgcggtataaccacgccgacgccgagtttcaggagcgtctgcaagaagatacgtcttttgggggcaacctcgggcgagcagtcttccaggccaagaagcgggttctcgaacctctcggtctggttgaggaaggcgctaagacggctcctggaaagaagagaccggtagagccatcaccccagcgttctccagactcctctacgggcatcggcaagaaaggccagcagcccgcgaaaaagagactcaactttgggcagactggcgactcagagtcagtgcccgaccctcaaccaatcggagaaccccccgcaggcccctctggtctgggatctggtacaatggctgcaggcggtggcgctccaatggcagacaataacgaaggcgccgacggagtgggtagttcctcaggaaattggcattgcgattccacatggctgggcgacagagtcatcaccaccagcacccgaacctgggccctccccacctacaacaaccacctctacaagcaaatctccaacgggacttcgggaggaagcaccaacgacaacacctacttcggctacagcaccccctgggggtattttgactttaacagattccactgccacttctcaccacgtgactggcagcgactcatcaacaacaactggggattccggcccaagagactcaacttcaagctcttcaacatccaggtcaaggaggtcacgcagaatgaaggcaccaagaccatcgccaataaccttaccagcacgattcaggtctttacggactcggaataccagctcccgtacgtcctcggctctgcgcaccagggctgcctgcctccgttcccggcggacgtcttcatgattcctcagtacgggtacctgactctgaacaatggcagtcaggccgtgggccgttcctccttctactgcctggagtactttccttctcaaatgctgagaacgggcaacaactttgagttcagctaccagtttgaggacgtgccttttcacagcagctacgcgcacagccaaagcctggaccggctgatgaaccccctcatcgaccagtacctgtactacctgtctcggactcagtccacgggaggtaccgcaggaactcagcagttgctattttctcaggccgggcctaataacatgtcggctcaggccaaaaactggctacccgggccctgctaccggcagcaacgcgtctccacgacactgtcgcaaaataacaacagcaactttgcctggaccggtgccaccaagtatcatctgaatggcagagactctctggtaaatcccggtgtcgctatggcaacccacaaggacgacgaagagcgattttttccgtccagcggagtcttaatgtttgggaaacagggagctggaaaagacaacgtggactatagcagcgttatgctaaccagtgaggaagaaattaaaaccaccaacccagtggccacagaacagtacggcgtggtggccgataacctgcaacagcaaaacgccgctcctattgtaggggccgtcaacagtcaaggagccttacctggcatggtctggcagaaccgggacgtgtacctgcagggtcctatctgggccaagattcctcacacggacggaaactttcatccctcgccgctgatgggaggctttggactgaaacacccgcctcctcagatcctgattaagaatacacctgttcccgcggatcctccaactaccttcagtcaagctaagctggcgtcgttcatcacgcagtacagcaccggacaggtcagcgtggaaattgaatgggagctgcagaaagaaaacagcaaacgctggaacccagagattcaatacacttccaactactacaaatctacaaatgtggactttgctgttaacacagatggcacttattctgagcctcgccccatcggcacccgttacctcacccgtaatctgtaattgcttgttaatcaataaaccggttgattcgtttcagttgaactttggtctctgcgaagggcgaattc

SEQ ID NO: 418 - protein, 738 aa, Adeno-associated virus; identical to SEQ ID NO: 34

SEQ ID NO: 419 - protein, 733 aa, Adeno-associated virus
MAADGYLPDWLEDNLSEGIREWWDLRPGAPKPKANQQKQDDGRGLVLPGYKYLGPFNGLDKGEPVNEADAAALEHDKAYDKQLEQGDNPYLKYNHADAEFQERLQEDTSFGGNLGRAVFQAKKRVLEPLGLVEEGAKTAPGKKRPIESPDSSTGIGKKGQQPAKKRLNFGQTGDSESVPDPQPIGEPPAGPSGLGSGTMAAGGGAPMADNNEGADGVGSSSGNWHCDSTWLGDRVITTSTRTWALPTYNNHLYKQISNGTSGGSTNDNTYFGYSTPWGYFDFNRFHCHFSPRDWQRLINNNWGFRPKRLNFKLFNIQVKEVTQNEGTKTIANNLTSTIQVFTDSEYQLPYVLGSAHQGCLPPFPADVFMIPQYGYLTLNNGSQAVGRSSFYCLEYFPSQMLRTGNNFEFSYQFEDVPFHSSYAHSQSLDRLMNPLIDQYLYYLSRTQSTGGTAGTQQLLFSQAGPNNMSAQAKNWLPGPCYRQQRVSTTVSQNNNSNFAWTGATKYHLNGRDSLVNPGVAMATHKGDEERFFPSSGVLMFGKQGAGKDNVDYSSVMLTSEEEIKTTNPVATEQYGVVADNLQQQNAAPIVGAVNSQGALPGMVWQNRDVYLQGPIWAKIPHTDGNFHPSPLMGGFGLKHPPPQILIKNTPVPADPPTTFSQAKLASFITQYSTGQVSVEIEWELQKENSKRWNPEIQYTSNYYKSTNVDFAVNTEGTYSEPRPIGTRYLTRNL

SEQ ID NO: 420 - DNA, 2501 bp, Adeno-associated virus
  source 1..2501: mol_type = unassigned DNA
gaattcgcccttggctgcgtcaactggaccaatgagaactttcccttcaacgattgcgtcgacaagatggtgatctggtgggaggagggcaagatgacggccaaggtcgtggagtccgccaaggccattcatcatctgctggggcgggctcccgagattgcttgctcggcctgcgatctggtcaacgtggacctggatgactgtgtttctgagcaataaatgacttaaaccaggtatggctgccgatggttatcttccagattggctcgaggacaacctctctgagggcattcgcgagtggtgggacttgagacctggagccccgaaacccaaagccaaccagcaaaagcaggacgacggccggggtctggtgcttcctggctacaagtacctcggacccttcaacggactcgacaagggagagccggtcaacgaggcagacgccgcggccctcgagcacgacaaggcctacgacaagcagctcgagcagggggacaacccgtacctcaagtacaaccacgccgacgccgagtttcaggagcgtcttcaagaagatacgtcttttgggggcaacctcgggcgagcagtcttccaggccaagaagcgggttctcgaacctctcggtctggttgaggaaggcgctaagacggctcctggaaagaagagacccatagaatcccccgactcctccacgggcatcggcaagaaaggccagcagcccgctaaaaagagactcaactttgggcagactggcgactcagagtcagtgcccgaccctcaaccaatcggagaaccccccgcaggcccctctggtctgggatctggcacaatggctgcaggcggtggcgctccaatggcagacaataacgaaggcgccgacggagtgggtagttcctcaggaaattggcattgcgattccacatggctgggcgacagagtcatcaccaccagcacccgaacctgggccctccccacctacaacaaccacctctacaagcaaatctccaacgggacatcgggaggaagcaccaacgacaacacctacttcggctacagcaccccctgggggtattttgactttaacagattccactgccacttctcaccacgtgactggcagcgactcatcaacaacaactggggattccggcccaagagactcaacttcaagctcttcaacatccaggtcaaggaggtcacgcagaatgaaggcaccaagaccatcgccaataaccttaccagcacgattcaggtctttacggactcggaataccagctcccgtacgtcctcggctctgcgcaccagggctgcctgcctccgttcccggcggacgtcttcatgattcctcagtacgggtacctgactctgaacaacggcagtcaggccgtgggccgttcctccttctactgcctggagtactttccttctcaaatgctgagaacgggcaacaactttgagttcagctaccagtttgaggacgtgccttttcacagcagctatgcgcacagccaaagcctggaccggctgatgaaccccctcatcgaccagtacctgtactacctgtctcggactcagtccacgggaggtaccgcaggaactcagcagttgctattttctcaggccgggcctaataacatgtcggctcaggccaaaaactggctacccgggccctgctaccggcagcaacgcgtctccacgacagtgtcgcaaaataacaacagcaactttgcttggaccggtgccaccaagtatcatctgaatggcagagactctctggtaaatcccggtgtcgctatggcaacgcacaagggcgacgaagagcgattttttccatccagcggagtcttgatgtttgggaaacagggagctggaaaagacaacgtagactatagcagcgttatgctaaccagtgaggaagaaatcaaaaccaccaacccagtggccacagaacagtacggcgtggtggccgataacctgcaacagcaaaacgccgctcctattgtaggggccgtcaacagtcaaggagccttacctggcatggtctggcagaaccgggacgtgtacctgcagggtcctatctgggccaagattcctcacacggacggcaactttcatccttcgccgctgatgggaggctttggactgaaacacccgcctcctcagatcctgattaagaatacacctgttcccgcggatcctccaactaccttcagtcaagccaagctggcgtcgttcatcacgcagtacagcaccggacaggtcagcgtggaaattgaatgggagctgcagaaagagaacagcaagcgctggaacccagagattcagtatacttccaactactacaaatctacaaatgtggactttgctgtcaatactgagggtacttattcagagcctcgccccattggcacccgttacctcacccgtaacctgtaattgcctgttaatcaataaaccggttgattcgtttcagttgaactttggtctcaagggcgaattc

SEQ ID NO: 421 - DNA, 2187 bp, Adeno-associated virus
  source 1..2187: mol_type = unassigned DNA
atggctgccgatggttatcttccagattggctcgaggacaacctctctgagggcattcgcgagtggtgggacttgaaacctggagccccgaaacccaaagccaaccagcaaaagcaggacgacggccggggtctggtgcttcctggctacaagtacctcggacccttcaacggactcgacaagggagagccggtcaacgaggcagacgccgcggccctcgagcacgacaaggcctacgacaagcagctcgagcagggggacaacccgtacctcaagtacaaccacgccgacgccgagtttcaggagcgtcttcaagaagatacgtcttttgggggcaacctcgggcgagcagtcttccaggccaagaagcgggttctcgaacctctcggtctggttgaggaaggcgctaagacggctcctggaaagaagagacccatagaatcccccgactcctccacgggcatcggcaagaaaggccagcagcccgctaaaaagaagctcaactttgggcagactggcgactcagagtcagtgcccgacccccaacctctcggagaacctcccgccgcgccctcaggtctgggatctggtacaatggctgcaggcggtggcgcaccaatggcagacaataacgaaggcgccgacggagtgggtaatgcctccggaaattggcattgcgattccacatggctgggcgacagagtcatcaccaccagcacccgcacctgggccctgcccacctacaacaaccacctctacaagcagatatcaagtcagagcggggctaccaacgacaaccacttcttcggctacagcaccccctggggctattttgacttcaacagattccactgccacttctcaccacgtgactggcagcgactcatcaacaacaactggggattccggcccagaaagctgcggttcaagttgttcaacatccaggtcaaggaggtcacgacgaacgacggcgttacgaccatcgctaataaccttaccagcacgattcaggtcttctcggactcggagtaccaactgccgtacgtcctcggctctgcgcaccagggctgcctccctccgttccctgcggacgtgttcatgattcctcagtacggatatctgactctaaacaacggcagtcagtctgtgggacgttcctccttctactgcctggagtactttccttctcagatgctgagaacgggcaataactttgaattcagctacacctttgaggaagtgcctttccacagcagctatgcgcacagccagagcctggaccggctgatgaatcccctcatcgaccagtacctgtactacctggcccggacccagagcactacggggtccacaagggagctgcagttccatcaggctgggcccaacaccatggccgagcaatcaaagaactggctgcccggaccctgttatcggcagcagagactgtcaaaaaacatagacagcaacaacaacagtaactttgcctggaccggggccactaaataccatctgaatggtagaaattcattaaccaacccgggcgtagccatggccaccaacaaggacgacgaggaccagttctttcccatcaacggagtgctggtttttggcgaaacgggggctgccaacaagacaacgctggaaaacgtgctaatgaccagcgaggaggagatcaaaaccaccaatcccgtggctacagaagaatacggtgtggtctccagcaacctgcaatcgtctacggccggaccccagacacagactgtcaacagccagggggctctgcccggcatggtctggcagaaccgggacgtgtacctgcagggtcccatctgggccaaaattcctcacacggacggcaactttcacccgtctcccctgatgggcggatttggactcaaacacccgcctcctcaaattctcatcaaaaacaccccggtacctgctaatcctccagaggtgtttactcctgccaagtttgcctcatttatcacgcagtacagcaccggccaggtcagcgtggagatcgagtgggaactgcagaaagaaaacagcaaacgctggaatccagagattcagtacacctcaaattatgccaagtctaataatgtggaatttgctgtcaacaacgaaggggtttatactgagcctcgccccattggcacccgttacctcacccgtaacctgtaa

SEQ ID NO: 422 - protein, 728 aa, Adeno-associated virus; identical to SEQ ID NO: 90

SEQ ID NO: 423 - protein, 728 aa, Adeno-associated virus; identical to SEQ ID NO: 182

SEQ ID NO: 424 - protein, 728 aa, Adeno-associated virus; identical to SEQ ID NO: 182

SEQ ID NO: 425 - protein, 733 aa, Adeno-associated virus
MAADGHLPDWLEDNLSEGIREWWDLKPGAPKPKANQQKQDDGRGLVLPGYKYLGPFNGLDKGEPVNAADAAALEHDKAYDQQLKAGDNPYLRYNHADAEFQERLQEDTSFGGNLGRAVFQAKKRVLEPLGLVEEGAKTAPGKKRPIESPDSSTGIGKKGQQPAKKKLNFGQTGDSESVPDPQPIGEPPAGPSGLGSGTMAAGGGAPMADNNEGADGVGSSSGNWHCDSTWLGDRVITTSTRTWALPTYNNHLYKQISNGTSGGSTNDNTYFGYSTPWGYFDFNRFHCHFSPRDWQRLINNSWGFRPKRLNFKLFNIQVKEVTQNEGTKTIANNLTSTIQVFTDSEYQLPYVLGSAHQGCLPPFPADVFMIPQYGYLTLNNGSQAVGRSSFYCLEYFPSQMLRTGNNFEFSYQFEDVPFHSSYAHSQSLDRLMNPLIDQYLYYLSRTQSTGGTAGTQQLLFSQAGPNNMSAQAKNWLPGPCYRQQRVSTTLSQNNNSNFAWTGATKYHLNGRDSLVNPGVAMATHKDDEERFFPSSGVLMFGKQGAGKDNVDYSSVMLTSEEEIKTTNPVATEQYGVVADNLQQQNAAPIVGAVNSQGALPGMVWQNRDVYLQGPIWAKIPHTDGNFHPSPLMGGFGLKHPPPQILIKNTPVPADPPTTFSQAKLASFITQYSTGQVSVEIEWELQKENSKRWNPEIQYTSNYYKSTNVDFAVNTEGTYSEPRPIGTRYLTRNL

SEQ ID NO: 426 - DNA, 3113 bp, Adeno-associated virus
  source 1..3113: mol_type = unassigned DNA
gaattcgccctttctacggctgcgtcaactggaccaatgagaactttcccttcaacgattgcgtcgacaagatggtgatctggtgggaggagggcaagatgacggccaaggtcgtggagtccgccaaggccattctcggcggcagcaaggtgcgcgtggaccaaaagtgcaagtcgtccgcccagatcgatcccacccccgtgatcgtcacttccaacaccaacatgtgcgccgtgattgacgggaacagcaccaccttcgagcaccagcagccgttacaagaccggatgttcaaatttgaactcacccgccgtctggagcatgactttggcaaggtgacaaagcaggaagtcaaagagttcttccgctgggcgcaggatcacgtgaccgaggtggcgcatgagttctacgtcagaaagggtggagccaacaagagacccgcccccgatgacgcggataaaagcgagcccaagcgggcctgcccctcagtcgcggatccatcgacgtcagacgcggaaggagctccggtggactttgccgacaggtaccaaaacaaatgttctcgtcacgcgggcatgcttcagatgctgcttccctgcaagacatgcgagagaatgaatcagaatttcagcatttgcttcacgcacgggaccagagactgttcagaatgtttccccggcgtgtcagaatctcaaccggtcgtcagaaagaggacgtatcggaaactctgtgccattcatcatctgctggggcgggctcccgagattgcttgctcggcctgcgatctggtcaacgtggacctggatgactgtgtttctgagcaataaatgacttaaaccaggtatggctgccgatggtcatcttccagattggctcgaggacaacctctctgagggcattcgcgagtggtgggacttgaaacctggagccccgaaacccaaagccaaccagcaaaagcaggacgacggccggggtctggtgcttcctggctacaagtacctcggacccttcaacggactcgacaagggggagcccgtcaacgcggcggacgcagcggccctcgagcacgacaaggcctacgaccagcagctcaaagcgggtgacaatccgtacctgcggtataaccacgccgacgccgagtttcaggagcgtcttcaagaagatacgtcttttgggggcaacctcgggcgagcagtcttccaggccaagaagcgggttctcgaacctctcggtctggttgaggaaggcgctaagacggctcctggaaagaagagacccatagaatcccccgactcctccacgggcatcggcaagaaaggccagcagcccgctaaaaagaagctcaactttgggcagactggcgactcagagtcagtgcccgaccctcaaccaatcggagaaccccccgcaggcccctctggtctgggatctggtacaatggctgcaggcggtggcgctccaatggcagacaataacgaaggcgccgacggagtgggtagttcctcaggaaattggcattgcgattccacatagctgggcgacagagtcatcaccaccagcacccgaacctgggccctccccacctacaacaaccacctctacaagcaaatctccaacgggacatcgggaggaagcaccaacgacaacacctacttcggctacagcaccccctgggggtattttgactttaacagattccactgccacttctcaccacgtgactggcagcgactcatcaacaacagctggggattccggcccaagagactcaacttcaagctcttcaacatccaggtcaaggaggtcacgcagaatgaaggcaccaagaccatcgccaataaccttaccagcacgattcaggtctttacggactcggaataccagctcccgtacgtcctcggctctgcgcaccagggctgcctgcctccgttcccggcggacgtcttcatgattcctcagtacgggtacctgactctgaacaacggcagtcaggccgtgggccgttcctccttctactgcctggagtactttccttctcaaatgctgagaacgggcaacaactttgagttcagctaccagtttgaggacgtgccttttcacagcagctacgcgcacagccaaagcctggaccggctgatgaaccccctcatcgaccagtacctgtactacctgtctcggactcagtccacgggaggtaccgcaggaactcagcagttgctattttctcaggccgggcctaataacatgtcggctcaggccaaaaactggctacccgggccctgctaccggcagcaacgcgtctccacgacactgtcgcaaaataacaacagcaactttgcttggaccggtgccaccaagtatcatctgaatggcagagactctctggtaaatcccggtgtcgctatggcaacgcacaaggacgacgaagagcgattttttccatccagcggagtcttgatgtttgggaaacagggagctggaaaagacaacgtggactatagcagcgttatgctaaccagtgaggaagaaatcaaaaccaccaacccagtggccacagaacagtacggcgtggtggccgataacctgcaacagcaaaacgccgctcctattgtaggggccgtcaacagtcaaggagccttacctggcatggtctggcagaaccgggacgtgtacctgcagggtcctatctgggccaagattcctcacacggacggcaactttcatccttcgccgctgatgggaggctttggactgaaacacccgcctcctcagatcctgattaagaatacacctgttcccgcggatcctccaactaccttcagtcaagccaagctggcgtcgttcatcacgcagtacagcaccggacaggtcagcgtggaaattgaatgggagctgcagaaagagaacagcaagcgctggaacccagagattcagtatacttccaactactacaaatctacaaatgtggactttgctgtcaatactgagggtacttattcagagcctcgccccattggcacccgttacctcacccgtaacctgtaattgcctgttaatcaataaaccggttaattcgtttcagttgaactttggtctctgcgaagggcgaattc

SEQ ID NO: 427 - protein, 731 aa, Adeno-associated virus
MAADGYLPDWLEDNLSEGIREWWDLKPGAPKPKANQQKQDDGRGLVLPGYKYLGPFNGLDKGEPVNEADAAALEHDKAYDKQLEQGDNPYLKYNHADAEFQERLQEDTSFGGNLGRAVFRAKKRVLEPLGLVEEGAKTAPGKKRPIESPDSSTGIGKKGQQPAKKKLNFGQTGDSESVPDPQPLGEPPAAPSGLGSGTMAAGGGAPMADNNEGADGVGNASGNWHCDSTWLGDRVITTSTRTWALPTYNNHLYKQISSQSGATNDNHFFGYSTPWGYFDFNRFHCHFSPRDWQRLINNNRGFRPRKLRFKLFNIQVKEVTTNDGVTTIANNLTSTIQVFSDSEYQLPYVLGSAHQGCLPPFPADVFMIPQYGYLTLNNGSQSVGRSSFYCLEYFPSQMLRTGNNFEFSYQFEDVPFHSSYAHSQSLDRLMNPLIDQYLYYLSRTQSTGGTAGTQQLLFSQAGPNNMSAQAKNWLPGPCYRQQRVSTTLSQNNNSNFAWTGATKYHLNGRDSLVNPGVAMATHKDDEERFFPSSGVLMFGKQGAGKDNVDYSSVMLTSEEEIKTTNPVATEQYGVVADNLQQQNAAPIVGAVNSQGALPGMAWQNRDVYLQGPIWAKIPHTDGNFHPSPLMGGFGLKHPPPQILIKNTPVPADPPTTFSQAKLASFITQYSTGQVSVEIEWELQKENSKRWNPEIQYTSNYYKSTNVDFAVNTEGTYSEPRPIGTRYLTRNL

SEQ ID NO: 428 - DNA, 3106 bp, Adeno-associated virus
  source 1..3106: mol_type = unassigned DNA
gaattcgcccttctacggctgcgtcaactggaccaatgagaactttcccttcaacgattgcgtcgacaagatggtgatctggtgggaggagggcaagatgacggccaaggtcgtggagtccgccaaggccattctcggcggcagcaaggtgcgcgtggaccaaaagtgcaagtcgtccgcccagatcgaccccacccccgtgatcgtcacctccaacaccaacatgtgcgccgtgattgacgggaacagcaccaccttcgagcaccagcagccgttgcaggaccggatgttcaaatttgaactcacccgccgtctggagcatgactttggcaaggcgacaaagcaggaagtcaaagagttcttccgctgggcgcaggatcacgtgaccgaggtggcgcatgagttctacgtcagaaagggtggagccaacaagagacccgcccccgatgacgcggataaaagcgagcccaagcgggcccgcccctcagtcgcggatccatcgacgtcagacgcggaaggagctccggtggactttgccgacaggtaccaaaacaaatgttctcgtcacgcgggcatgcttcagatgctgtttccctgcaaaacatgcgagagaatgaatcagaatttcaacatttgcttcacgcacgggaccagagactgttcagaatgtttccccggcgtgtcagaatctcaaccggtcgtcagaaagaggacgtatcggaaactctgtgccattcatcatctgctggggcgggctcccgagattgcttgctcggcctgcgatctggtcaacgtggacctggatgactgtgtttctgagcaataaatgacttaaaccaggtatggctgccgatggttatcttccagattggctcgaggacaacctctctgagggcattcgcgagtggtgggacttgaaacctggagccccgaaacccaaagccaaccagcaaaagcaggacgacggccggggtctggtgcttcctggctacaagtacctcggacccttcaacggactcgacaagggagagccggtcaacgaggcagacgccgcggccctcgagcacgacaaggcctacgacaagcagctcgagcagggggacaacccgtacctcaagtacaaccacgccgacgccgagtttcaggagcgtcttcaagaagatacgtcttttgggggcaacctcgggcgagcagtcttccgggccaagaagcgggttctcgaacctctcggtctggttgaggaaggcgctaagacggctcctggaaagaagagacccatagaatcccccgactcctccacgggcatcggcaagaaaggccagcagcccgctaaaaagaagctcaactttgggcagactggcgactcagagtcagtgcccgacccccaacctctcggagaacctcccgccgcgccctcaggtctgggatctggtacaatggctgcaggcggtggcgcaccaatggcagacaataacgaaggcgccgacggagtgggtaatgcctccggaaattggcattgcgattccacatggctgggcgacagagtcatcaccaccagcacccgcacctgggccctgcccacctacaacaaccacctctacaagcagatatcaagtcagagcggggctaccaacgacaaccacttcttcggctacagcaccccctggggctattttgacttcaacagattccactgccacttctcaccacgtgactggcagcgactcatcaacaacaaccggggattccggcccagaaagctgcggttcaagttgttcaacatccaggtcaaggaggtcacgacgaacgacggcgttacgaccatcgctaataaccttaccagcacgattcaggtcttctcggactcggagtaccaactgccgtacgtcctcggctctgcgcaccagggctgcctccctccgttccctgcggacgtgttcatgattcctcagtacggatatctgactctaaacaacggcagtcagtctgtgggacgttcctccttctactgcctggagtactttccttctcagatgctgagaacgggcaataactttgaattcagctaccagtttgaggacgtgccctttcacagcagctacgcgcacagccaaagcctggaccggctgatgaaccccctcatcgaccagtacctgtactacctgtctcggactcagtccacgggaggtaccgcaggaactcagcagttgctattttctcaggccgggcctaataacatgtcggctcaggccaaaaactggctacccgggccctgctaccggcagcaacgcgtctccacgacactgtcgcaaaataacaacagcaactttgcttggaccggtgccaccaagtatcatctgaatggcagagactctctggtaaatcccggtgtcgctatggcaacgcacaaggacgacgaagagcgattttttccatccagcggagtcttgatgtttgggaaacagggagctggaaaagacaacgtggactatagcagcgttatgctaaccagtgaggaagaaatcaaaaccaccaacccagtggccacagaacagtacggcgtggtggccgataacctgcaacagcaaaacgccgctcctattgtaggggccgtcaacagtcaaggagccttacctggcatggcctggcagaaccgggacgtgtacctgcagggtcctatctgggccaagattcctcacacggacggcaactttcatccttcgccgctgatgggaggctttggactgaaacacccgcctcctcagatcctgattaagaatacacctgttcccgcggatcctccaactaccttcagtcaagccaagctggcgtcgttcatcacgcagtacagcaccggacaggtcagcgtggaaattgaatgggagctgcagaaagagaacagcaagcgctggaacccagagattcagtatacttccaactactacaaatctacaaatgtggactttgctgtcaatactgagggtacttattcagagcctcgccccattggcacccgttacctcacccgtaacctgtaattgcctgttaatcaataaaccggttaattcgtttcagttgaactttggtctctgcgaagggcgaattc

SEQ ID NO: 429 - protein, 738 aa, Adeno-associated virus
MAADGYLPDWLEDNLSEGIREWWDLKPGAPKPKANQQKQDDGRGLVLPGYKYLGPFNGLDKGEPVNEADAAALEHDKAYDKQLEQGDNPYLKYNHADAEFQERLQEDTSFGGNLGRAVFQAKKRVLEPLGLVEEGAKTAPGKKRPVEPSPQRSPDSSTGIGKTGQQPAKKRLNFGQTGDSESVPDPQPIGEPPAGPSGLGSGTMAAGGGAPMADNNEGADGVGSSSGNWHCDSTWLGDRVITTSTRTWALPTYNNHLYKQISNGTSGGSTNDNTYFGYSTPWGYFDFNRFHCHFSPRDWQRLINNNWGFRPKRLNFKLFNIQVKEVTQNEGTKTIANNLTSTIQVFTDSEYQLPYVLGSAHQGCLPPFPADVFMIPQYGYLTLNNGSQAVGRSSFYCLEYFPSQMLRTGNNFEFSYQFEDVPFHSSYAHSQSLDRLMNPLIDQYLYYLSRTQSTGGTAGTQQLLFSQAGPNNMSAQAKNWLPGPCYRQQRVSTTLSQNNNSNFAWTGATKYHLNGRDSLVNPGVAMATHKDDEERFFPSSGVLMFGKQGAGKDNVDYSSVMLTSEEEIKTTNPVATEQYGVVADNLQQQNAAPIVGAVNSQGALPGMVWQNRDVYLQGPIWAKIPHTDGNFHPSPLMGGFGLKHPPPQILIKNTPVPADPPTTFSQAKLASFITQYSTGQVSVEIEWELQKENSKRWNPEIQYTSNYYKSTNVDFAVNTEGTYSEPRPIGTRYLTRNL

SEQ ID NO: 430 - DNA, 3197 bp, Adeno-associated virus
  source 1..3197: mol_type = unassigned DNA
gaattcgccctttctacggctgcgtcaactggaccaatgagaactttcccttcaacgattgcgtcgacaagatggtgatctggtgggaggagggcaagatgacggccaaggtcgtggagtccgccaaggccattctcggcggcagcaaggtgcgcgtggaccaaaagtgcaagtcgtccgcccagatcgaccccacccccgtgatcgtcacctccaacaccaacatgtgcgccgtgattgacgggaacagcaccaccttcgagcaccagcagccgttacaagaccggatgttcaaatttgaactcacccgccgtctggagcacgactttggcaaggtgacaaagcaggaagtcaaagagttcttccgctgggcgcaggatcacgtgaccgaggtggcgcatgagttctacgtcagaaagggtggagccaacaagagacccgcccccgatgacgcggataaaagcgagcccaagcgggcctgcccctcagtcgcggatccatcgacgtcagacgcggaaggagctccggtggactttgccgacaggtaccaaaacaaatgttctcgtcacgcgggcatgcttcagatgctgtttccctgcaagacatgcgagagaatgaatcagaatttcaacatttgcttcacgcacgggaccagagactgttcagaatgtttccccggcgtgtcagaatctcaaccggtcgtcagaaagaggacgtatcggaaactctgtgccattcatcatctgctggggcgggctcccgagattgcttgctcggcctgcgatctggtcaacgtggacctggatgactgtgtttctgagcaataaatgacttaaaccaggtatggctgccgatggttatcttccagattggctcgaggacaacctctctgagggcattcgcgagtggtgggacttgaaacctggagccccgaaacccaaagccaaccagcaaaagcaggacgacggccggggtctggtgcttcctggctacaagtacctcggacccttcaacggactcgacaagggagagccggtcaacgaggcagacgccgcggccctcgagcacgacaaggcctacgacaagcagctcgagcagggggacaacccgtacctcaagtacaaccacgccgacgccgagtttcaggagcgtcttcaagaagatacgtcttttgggggcaacctcgggcgagcagtcttccaggccaagaagcgggttctcgaacctctcggtctggttgaggaaggcgctaagacggctcctggaaagaagagaccggtagagccatcaccccagcgttctccagactcctctacgggcatcggcaagacaggccagcagcccgcgaaaaagagactcaactttgggcagactggcgactcagagtcagtgcccgaccctcaaccaatcggagaaccccccgcaggcccctctggtctgggatctggtacaatggctgcaggcggtggcgctccaatggcagacaataacgaaggcgccgacggagtgggtagttcctcaggaaattggcattgcgattccacatggctgggcgacagagtcatcaccaccagcacccgaacctgggccctccccacctacaacaaccacctctacaagcaaatctccaacgggacatcgggaggaagcaccaacgacaacacctacttcggctacagcaccccctgggggtattttgactttaacagattccactgccacttctcaccacgtgactggcagcgactcatcaacaacaactggggattccggcccaagagactcaacttcaagctcttcaacatccaggtcaaggaggtcacgcagaatgaaggcaccaagaccatcgccaataaccttaccagcacgattcaggtctttacggactcggaataccagctcccgtacgtcctcggctctgcgcaccagggctgcctgcctccgttcccggcggacgtcttcatgattcctcagtacgggtacctgactctgaacaacggcagtcaggccgtgggccgttcctccttctactgcctggagtactttccttctcaaatgctgagaacgggcaacaactttgagttcagctaccagtttgaggacgtgccttttcacagcagctacgcgcacagccaaagcctggaccggctgatgaaccccctcatcgaccagtacctgtactacctgtctcggactcagtccacgggaggtaccgcaggaactcagcagttgctattttctcaggccgggcctaataacatgtcggctcaggccaaaaactggctacccgggccctgctaccggcagcaacgcgtctccacgacactgtcgcaaaataacaacagcaactttgcttggaccggtgccaccaagtatcatctgaatggcagagactctctggtaaatcccggtgtcgctatggcaacgcacaaggacgacgaagagcgattttttccatccagcggagtcttgatgtttgggaaacagggagctggaaaagacaacgtggactatagcagcgttatgctaaccagtgaggaagaaatcaaaaccaccaacccagtggccacagaacagtacggcgtggtggccgataacctgcaacagcaaaacgccgctcctattgtaggggccgtcaacagtcaaggagccttacctggcatggtctggcagaaccgggacgtgtacctgcagggtcctatctgggccaagattcctcacacggacggcaactttcatccttcgccgctgatgggaggctttggactgaaacacccgcctcctcagatcctgattaagaatacacctgttcccgcggatcctccaactaccttcagtcaagccaagctggcgtcgttcatcacgcagtacagcaccggacaggtcagcgtggaaattgaatgggagctgcagaaagagaacagcaagcgctggaacccagagattcagtatacttccaactactacaaatctacaaatgtggactttgctgtcaatactgagggtacttattcagagcctcgccccattggcacccgttacctcacccgtaacctgtaattgcctgttaatcaataaaccggttaattcgtttcagttgaactttggtctctgcgaagggcgaattcgtttaaacctgcaggactagtccctttagtgagggttaattctgagcttggcgtaatcatgggtcatag

SEQ ID NO: 431 - protein, 735 aa, Adeno-associated virus
MAADGYLPDWLEDNLSEGIREWWDLKPGAPKPKANQQKQDDGRGLVLPGYKYLGPFNGLDKGEPVNEADAAALEHDKAYDKQLEQGDNPYLKYNHADAEFQERLQEDTSFGGNLGRAVFQAKKRVLEPLGLVEEGAKTAPGKKRPVEPSPQRSPDSSTGIGKTGQQPAKKRLNFGQTGDSESVPDPQPIGEPPAGPSGLGSGTMAAGGGAPMADNNEGADGVGSSSGNWHCDSTWLGDRVITTSTRTWALPTYNNHLYKQISNGTSGGSTNDNTYFGYSTPWGYFDFNRFHCHFSPRDWQRLINNNWGFRPRKLRFKLFNIQVKEVTTDDGVTTIANNLTSTIQVFSDSEYQLPYVLGSAHQGCLPPFPADVFMIPQYGYLTLNNGSQSVGRSSFYCLEYFPSQMLRTGNNFEFSYTFEEVPFHSSYAHSQSLDRLMNPLIDQYLYYLARTQSTTGSTRELQFHQAGPNTMAEQSKNWLPGPCYRQQRLSKNIDSNNNSNFAWTGATKYHLNGRNSLTNPGVAMATNKDDEDQFFPINGVLVFGKTGAANKTTLENVLMTSEEEIKTTNPVATEEYGVVSSNLQSSTAGPQTQTVNSQGALPGMVWQNRDVYLQGPIWAKIPHTDGNFHPSPLMDGFGLKHPPPQILIKNTPVPANPPEVFTPAKFASFITQYSTGQVSVEIEWELQKENSKRWNPEIQYTSNYAKSNNVEFAVNNEGVYTEPRPIGTRYLTRNL

SEQ ID NO: 432 - DNA, 3276 bp, Adeno-associated virus
  source 1..3276: mol_type = unassigned DNA
gaattcgcccttcgcagagaccaaagttcaactgaaacgaattaaccggtttattgattaacaggcaattacaggttacgggtgaggtaacgggtgccaatggggcgaggctcagtataaaccccttcgttgttgacagcaaattccacattattagacttggcataatttgaggtgtactgaatctctggattccagcgtttgctgttttctttctgcagttcccactcgatctccacgctgacctggccggtgctgtactgcgtgataaatgaggcaaacttggcaggagtaaacacctctggaggattagcaggtaccggggtgtttttgatgagaatttgaggaggcgggtgtttgagtccaaatccgtccatcaggggagacgggtgaaagttgccgtccgtgtgaggaattttggcccagatgggaccctgcaggtacacgtcccggttctgccagaccatgccgggcagagccccctggctgttgacagtctgtgtctggggtccggccgtagacgattgcaggttgctggagaccacaccgtattcttctgtagccacgggattggtggttttgatctcctcctcgctggtcattagcacgttttccagcgttgtcttgttggcagcccccgttttgccaaaaaccagcactccgttgatgggaaagaactggtcctcgtcgtccttgttggtggccatggctacgcccgggttggttaatgaatttctaccattcagatggtatttagtggccccggtccaggcaaagttactgttgttgttgctgtctatgttttttgacagtctctgctgccgataacagggtccgggcagccagttctttgattgctcggccatggtgttgggcccagcctgatggaactgcagctcccttgtggaccccgtagtgctctgggtccgggccaggtagtacaggtactggtcgatgaggggattcatcagccggtccaggctctggctatgcgcatagctgctgtggaaaggcacttcctcaaaggtgtagctgaattcaaagttattgcccgttctcagcatctgagaaggaaagtactccaggcagtagaaggaggaacgtcccacagactgactgccgttgtttagagtcagatatccgtactgaggaatcatgaacacgtccgcagggaacggagggaggcagccctggtgcgcagagccgaggacgtacggcagttggtactccgagtccgagaagacctgaatcgtgctggtaaggttattagcgatggtcgtaacgccgtcgtccgtcgtgacctccttgacctggatgttgaacaacttgaaccgcagctttctgggccggaatccccagttgttgttgatgagtcgctgccagtcacgtggtgagaagtggcagtggaatctgttaaagtcaaaatacccccagggggtgctgtagccgaagtaggtgttgtcgttggtgcttcctcccgatgtcccgttggagatttgcttgtagaggtggttgttgtaggtggggagggcccaggttcgggtgctggtggtgatgactctgtcgcccagccatgtggaatcgcaatgccaatttcctgaggaactacccactccgtcggcgccttcgttattgtctgccattggagcgccaccgcctgcagccattgtaccagatcccagaccagaggggcctgcggggggttctccgattggttgagggtcgggcactgactctgagtcgccagtctgcccaaagttgagtctctttttcgcgggctgctggcctgtcttgccgatgcccgtagaggagtctggagaacgctggggtgatggctctaccggtctcttctttccaggagccgtcttagcgccttcctcaaccagaccgagaggttcgagaacccgcttcttggcctggaagactgctcgcccgaggttgcccccaaaagacgtatcttcttgaagacgctcctgaaactcggcgtcggcgtggttgtacttgaggtacgggttgtccccctgctcgagctgcttgtcgtaggccttgtcgtgctcgagggccgcggcgtctgcctcgttgaccggctctcccttgtcgagtccgttgaagggtccgaggtacttgtagccaggaagcaccagaccccggccgtcgtcctgcttttgctggttggctttgggtttcggggctccaggtttcaagtcccaccactcgcgaatgccctcagagaggttgtcctcgagccaatctggaagataaccatcggcagccatacctggtttaagtcatttattgctcagaaacacagtcatccaggtccacgttgaccagatcgcaggccgagcaagcaatctcgggagcccgccccagcagatgatgaatggcacagagtttccgatacgtcctctttctgacgaccggttgagattctgacacgccggggaaacattctgaacagtctctggtcccgtgcgtgaagcaaatgttgaaattctgattcattctctcgcatgtcttgcagggaaacagcatctgaagcatgcccgcgtgacgagaacacttgttttggtacctgtcggcaaagtccaccggagctccttccgcgtctgacgtcgatggatgcaaaatgtcgcaaaagcactcacgtgacagctaatacaggaccactcccctatgacgtgatttacgtcagcgctatgcccgcgtgacgagaacatttgttttggtacctgtcggcaaagtccaccggagctccttccgcgtctgacgtcgatggatccgcgactgaggggcaggcccgcttgggctcgcttttatccgcgtcatcgggggcgggtctcttgttggctccaccctttctgacgtagaactcatgcgccacctcggtcacgtgatcctgcgcccagcggaagaactctttgacttcctgctttgtcaccttgccaaagtcatgctccagacggcgggtgagttcaaatttgaacatccggtcctgcaacggctgctggtgctcgaaggtggtgctgttcccgtcaatcacggcgcacatgttggtgttggaagtgacgatcacgggggtgggatcgatctgggcggaagacttgcacttttggtccacgcgcaccttgctgccgccgagaatggccttggcggactccacgaccttggccgtcatcttgccctcctcccaccagatcaccatcttgtcgacgcaatcgttgaagggaaagttctcattggtccagttgacgcagccgtagaaagggcgaattc

SEQ ID NO: 433 - protein, 738 aa, Adeno-associated virus; identical to SEQ ID NO: 98

SEQ ID NO: 434 - protein, 738 aa, Adeno-associated virus
MAADGYLPDWLEDNLSEGIREWWDLKPGAPKPKANQQKQDDGRGLVLPGYKYLGPFNGLDKGEPVNAADAAALEHDKAYDQQLKAGDNPYLRYNHADAEFQERLQEDTSFGGNLGRAVFQAKKRVLEPLGLVEEGAKTAPGKKRPVEPSPQRSPDSSTGIGKKGHQPARKRLNFGQTGDSESVPDPQPIGEPPAGPSGLGSGTMAAGGGAPMADNNEGADGVGSSSGNWHCDSTWLGDRVITTSTRTWALPTYNNHLYKQISNGTSGGSTNDNTYFGYSTPWGYFDFNRFHCHFSPRDWQRLINNNWGFRPKRLNFKLFNIQVKEVTQNEGTKTIANNLTSTIQVFTDSEYQLPYVPGSAHQGCLPPFPADVFMIPQYGYLTLNNGSQAVGRSSFYCLEYFPSQMLRTGNNFEFSYTFEDVPFHSSYAHSQSLDRLMNPLIDQYLYYLSRTQSTGGTQGTQQLLFSQAGPANMSAQAKNWLPGPCYRQQRVSTTLSQNNNSNFAWTGATKYHLNGRDSLVNPGVAMATHKDDEERFFPSSGVLMFGKQGAGKDNVDYSSVMLTSEEEIKTTNPVATEQYGVVADNLQQTNGAPIVGTVNSQGALPGMVWQNRDVYLQGPIWAKIPHTDGNFHPSPLMGGFGLKHPPPQILIKNTPVPADPPTTFSQAKLASFITQYSTGQVSVEIEWELQKENSKRWNPEIQYTSNYYKSTNVDFAVNTEGTYSEPRPIGTRYLTRNL

SEQ ID NO: 435 - protein, 738 aa, Adeno-associated virus; identical to SEQ ID NO: 96

SEQ ID NO: 436 - protein, 728 aa, Adeno-associated virus
MAADGYLPDWLEDNLSEGIREWWDLKPGAPKPKANQQKQDDGRGLVLPGYKYLGPFNGLDKGEPVNEADAAALEHDKAYDKQLEQGDNPYLKYNHADAEFQERLQEDTSFGGNLGRAVFQAKKRVLEPLGLVEEGAKTAPGKKRPIESPDSSTGIGRKGQQPAKKKLNFGQTGDSESVPDPQPIGEPPAGPSGLGSGTMAAGGGAPMADNNEGADGVGNASGNWHCDSTWLGDRVITTSTRTWALPTYNNHLYKQISSQSGATNDNHFFGYSTPWGYFDFNRFHCHFSPRDWQRLINNNWGFRPRKLRFKLFNIQVKEVTTNDGVTTIANNLTSTIQVFSDSEYQLPYVLGSAHQGCLPPFPADVFMIPQYGYLTLNNGSQSVGRSSFYCLEYFPSQMLRTGNNFEFSYTFEEVPFHSSYAHSQSLDRLMNPLIDQYLYYLARTQSTTGSTRELQFHQAGPNTMAEQSKNWLPGPCYRQQRLSKNIDSNNNSNFAWTGATKYHLNGRNSLTNPGVAMATNKDDEDQFFPINGVLVFGKTGAANKTTLENVLMTSEEEIKTTNPVATEEYGVVSSNLQSSTAGPQTQTVNSQGALPGMVWQNRDVYLQGPIWAKIPHTDGNFHPSPLMGGFGLKHPPPQILIKNTPVPANPPEVFTPAKFASFITQYSTGQVSVEIEWELQKENSKRWNPEIQYTSNYAKSNNVEFAVNNEGVYTEPRPIGTRYLTRNL

SEQ ID NO: 437 - DNA, 2489 bp, Adeno-associated virus
  source 1..2489: mol_type = unassigned DNA
gaattcgccctttctacggctgcgtcaactggaccaatgagaactttcccttcaacgattgcgtcgacaagatggtgatctggtgggaggagggcaagatgacggccaaggtcgtgaagtccgccaaggccattcatcatctgctggggcgggctcccgagattgcttgctcggcctgcgatctggtcaacgtggacctggatgactgtgtttctgagcaataaatgacttaaaccaggtatggctgccgatggttatcttccagattggctcgaggacaacctctctgagggcattcgcgagtggtgggacttgaaacctggagccccgaaacccaaagccaaccagcaaaagcaggacgacggccggggtctggtgcttcctggctacaagtacctcggacccttcaacggactcgacaagggagagccggtcaacgaggcagacgccgcggccctcgagcacgacaaggcctacgacaagcagctcgagcagggggacaacccgtacctcaagtacaaccacgccgacgccgagtttcaggagcgtcttcaagaagatacgtcttttgggggcaacctcgggcgagcagtcttccaggccaagaagcgggttctcgaacctctcggtctggttgaggaaggcgctaagacggctcctggaaagaagagacccatagaatcccccgactcctccacgggcatcggcaggaaaggccagcagcccgctaaaaagaagctcaactttgggcagactggcgactcagagtcagtgcccgaccctcaaccaatcggagaaccccccgcaggcccctctggtctgggatctggtacaatggctgcaggcggtggcgctccaatggcagacaataacgaaggcgccgacggagtgggtaatgcctccggaaattggcattgcgattccacatggctgggcgacagagtcatcaccaccagcacccgcacctgggccctgcccacctacaacaaccacctctacaagcagatatcaagtcagagcggggctaccaacgacaaccacttcttcggctacagcaccccctggggctattttgacttcaacagattccactgccacttctcaccacgtgactggcagcgactcatcaacaacaactggggattccggcccagaaagctgcggttcaagttgttcaacatccaggtcaaggaggtcacgacgaacgacggcgttacgaccatcgccaataaccttaccagcacgattcaggtcttctcggactcggagtaccaactgccgtacgtcctcggctctgcgcaccagggctgcctccctccgttccctgcggacgtgttcatgattcctcagtacggatatctgactctaaacaacggcagtcagtctgtgggacgttcctccttctactgcctggagtactttccttctcagatgctgagaacgggcaataactttgaattcagctacacctttgaggaagtgcctttccacagcagctatgcgcacagccagagcctggaccggctgatgaatcccctcatcgaccagtacctgtactacctggcccggacccagagcactacggggtccacaagggagctgcagttccatcaggctgggcccaacaccatggccgagcaatcaaagaactggctgcccggaccctgttatcggcagcagagactgtcaaaaaacatagacagcaacaacaacagtaactttgcctggaccggggccactaaataccatctgaatggtagaaattcattaaccaacccgggcgtagccatggccaccaacaaggacgacgaggaccagttctttcccatcaacggagtgctggtttttggcaaaacgggggctgccaacaagacaacgctggaaaacgtgctaatgaccagcgaggaggagatcaaaaccaccaatcccgtggctacagaagaatacggtgtggtctccagcaacctgcaatcgtctacggccggaccccagacacagactgtcaacagccagggggctctgcccggcatggtctggcagaaccgggacgtgtacctgcagggtcccatctgggccaaaattcctcacacggacggcaactttcacccgtctcccctgatgggcggatttggactcaaacacccgcctcctcaaattctcatcaaaaacaccccggtacctgctaatcctccagaggtgtttactcctgccaagtttgcctcatttatcacgcagtacagcaccggccaggtcagcgtggagatcgagtgggaactgcagaaagaaaacagcaaacgctggaatccagagattcagtacacctcaaattatgccaagtctaataatgtggaatttgctgtcaacaacgaaggggtttatactgagcctcgccccattggcacccgttacctcacccgtaacctgtaattgcctgttaatcaataaaccggttaattcgtttcagttgaactttggtcaagggcgaattc

SEQ ID NO: 438 - protein, 728 aa, Adeno-associated virus
MAADGYLPDWLEDNLSEGIREWWDLKPGAPKPKANQQKQDDGRGLVLPGYKYLGPFNGLDKGEPVNAADAAALEHDKAYDQQLKAGDNPYLRYNHADAEFQERLQEDTSFGGNLGRAVFQAKKRVLEPLGLVEEGAKTAPGKKRPIESPDSSTGIGKKGQQPAKKKLNFGQTGDSESVPDPQPIGEPPAGPSGLGSGTMAAGGGAPMADNNEGADGVGNASGNWHCDSTWLGDRVITTSTRTWALPTYNNHLYKQISSQSGATNDNHFFGYSTPWGYFDFNRFHCHFSPRDWQRLINNNWGFRPRKLRFKLFNIQVKEVTTNDGVTTIANNLTSTIQVFSDSEYQLPYVLGSAHQGCLPPFPADVFMIPQYGYLTLNNGSQSVGRSSFYCLEYFPSQMLRTGNNFEFSYTFEEVPFHSSYAHSQSLDRLMNPLIDQYLYYLARTQSTTGSTRELQFHQAGPNTMAEQSKNWLPGPCYRRQRLSKDIDSNNNSNFAWTGATKYHLNGRNSLTNPGVAMATNKDDEDQFFPINGVLVFGKTGAANKTTLENVLMTSEEEIKTTNPVATEEYGVVSSNLQSSTAGPQTQTVNSQGALPGMVWQNRDVYLQGPIWAKIPHTDGNFHPSPLMGGFGLKHPPPQILIKNTPVPANPPEVFTPAKFASFITQYSTGQVSVEIEWELQKENSKRWNPEIQYTSNYAKSNNVEFAVNNEGVYTEPRPIGTRYLTRNL

SEQ ID NO: 439 - DNA, 3098 bp, Adeno-associated virus
  source 1..3098: mol_type = unassigned DNA
gaattcgccctttctacggctgcgtcaactggaccaatgagaactttcccttcaacgattgcgtcgacaagatggtgatctggtgggaggagggcaagatgacggccaaggtcgtggagtccgccaaggccattctcggcggcagcaaggtgcgcgtggaccaaaagtgcaagtcttccgcccagatcgatcccacccccgtgatcgtcacttccaacaccaacatgtgcgccgtgattgacgggaacagcaccaccttcgagcaccagcagccgttacaagaccggatgttcaaatttgaactcacccgccgtctggagcacgactttggcaaggtgacaaagcaggaagtcaaagagttcttccgctgggcgcaggatcacgtgaccgaggtggcgcatgagttctacgtcagaaagggtggagccaacaagagacccgcccccgatgacgcggataaaagcgagcccaagcgggcctgcccctcagtcgcggatccatcgacgtcagacgcggaaggagctccggtggactttgccgacaggtaccaaaacaaatgttctcgtcacgcgggcatgcttcagatgctgtttccctgcaagacatgcgagagaatgaatcagaatttcaacatttgcttcacgcacgggaccggagactgttcagaatgtttccccggcgtgtcagaatctcaaccggtcgtcagaaagaggacgtatcggaaactctgtgccattcatcatctgctggggcgggctcccgagattgcttgctcggcctgcgatctggtcaacgtggacctggatgactgtgtttctgagcaataaatgacttaaaccaggtatggctgccgatggttatcttccagattggctcgaggacaacctctctgagggcattcgcgagtggtgggacttgaaacctggagccccgaaacccaaagccaaccagcaaaagcaggacgacggccggggtctggtgcttcctggctacaagtacctcggacccttcaacggactcgacaagggagagccggtcaacgcggcggacgcagcggccctcgagcacgacaaggcctacgaccagcagctcaaagcgggtgacaatccgtacctgcggtataaccacgccgacgccgagtttcaggagcgtcttcaagaagatacgtcttttgggggcaacctcgggcgagcagtcttccaggccaagaagcgggttctcgaacctctcggtctggttgaggaaggcgctaagacggctcctggaaagaagagacccatagaatcccccgactcctccacgggcatcggcaagaaaggccagcagcccgctaaaaagaagctcaactttgggcagactggcgactcagagtcagtgcccgaccctcaaccaatcggagaaccccccgcaggcccctctggtctgggatctggtacaatggctgcaggcggtggcgctccaatggcagacaataacgaaggcgccgacggagtgggtaatgcctccggaaattggcattgcgattccacatggctgggcgacagagtcatcaccaccagcacccgcacctgggccctgcccacctacaacaaccacctctacaagcagatatcaagtcagagcggggctaccaacgacaaccacttcttcggctacagcaccccctggggctattttgacttcaacagattccactgccacttctcaccacgtgactggcagcgactcatcaacaacaactggggattccggcccagaaagctgcggttcaagttgttcaacatccaggtcaaggaggtcacgacgaacgacggcgttacgaccatcgctaataaccttaccagcacgattcaggtcttctcggactcggagtaccaactgccgtacgtcctcggctctgcgcaccagggctgcctccctccgttccctgcggacgtgttcatgattcctcagtacggatatctgactctaaacaacggcagtcagtctgtgggacgttcctccttctactgcctggagtactttccttctcagatgctgagaacgggcaataactttgaattcagctacacctttgaggaagtgcctttccacagcagctatgcgcacagccagagcctggaccggctgatgaatcccctcatcgaccagtacctgtactacctggcccggacccagagcactacggggtccacaagggagctgcagttccatcaggctgggcccaacaccatggccgagcaatcaaagaactggctgcccggaccctgttatcggcggcagagactgtcaaaagacatagacagcaacaacaacagtaactttgcctggaccggggccactaaataccatctgaatggtagaaattcattaaccaacccgggcgtagccatggccaccaacaaggacgacgaggaccagttctttcccatcaacggagtgctggtttttggcaaaacgggggctgccaacaagacaacgctggaaaacgtgctaatgaccagcgaggaggagatcaaaaccaccaatcccgtggctacagaagaatacggtgtggtctccagcaacctgcaatcgtctacggccggaccccagacacagactgtcaacagccagggggctctgcccggcatggtctggcagaaccgggacgtgtacctgcagggtcccatctgggccaaaattcctcacacggacggcaactttcacccgtctcccctgatgggcggatttggactcaaacacccgcctcctcaaattctcatcaaaaacaccccggtacctgctaatcctccagaggtgtttactcctgccaagtttgcctcatttatcacgcagtacagcaccggccaggtcagcgtggagatcgagtgggaactgcagaaagagaacagcaaacgctggaatccagagattcagtacacctcaaattatgccaagtctaataatgtggaatttgctgtcaacaacgaaggggtttatactgagcctcgccccattggcacccgttacctcacccgtaacctgtaattacttgttaatcaataaaccggttgattcgtttcagttgaactttggtctctgcgaagggcgaattc

SEQ ID NO: 440 - protein, 685 aa, Adeno-associated virus
MAADGYLPDWLEDNLSEGIREWWDLKPGAPKPKANQQKQDDGRGLVLPGYKYLGPFNGLDKGEPVNEADAAALEHDKAYDKQLEQGDNPYLKYNHADAEFQERLQEDTSFGGNLGRAVFQAKKRVLEPLGLVEEGAKTAPGKKRPVEPSPQRSPDSSTGIGKTGQQPAKKRLNFGQTGDSESVPDPQPIGEPPAGPSGLGSGTMAAGGGAPMADNNEGADGVGSSSGNWHCDSTWLGDRVITTSTRTWALPTYNNHLYKQISNGTSGGSTNDNTYFGYSTPWGYFDFNRFHCHFSPRDWQRLINNNWGFRPKRLNFKLFNIQVKEVTQNEGTKTIANNLTSTIQVFTDSEYQLPYVLGSAHQGCLPPFPADVFMIPQYGYLTLNNGSQAVGRSSFYCLEYFPSQMLRTGNNFEFSYQFEDVPFHSSYAHSQSLDRLTNPLIDQYLYYLARTQSTTGSTRGLQFHQAGPNTMAEQSKNWLPGPCYRQQRLSKNIDSNNNSNFAWTGATKYHLNGRNSLTNPGVAMATNKDDEDQFFPINGVLVFGKTGAANKTTLENVLMTSEEEIKTTNPVATEEYGVVSSNLQSSTAGPQTQTVNSQGALPGMVWQNRDVYLQGPIWAKIPHTDGNFHPSPLMGGFGLKHPPPQILIKYTSNYYKSTNVDFAVNTEGTYSEPRPIGTRYLTRNL

SEQ ID NO: 441 - DNA, 2969 bp, Adeno-associated virus
  source 1..2969: mol_type = unassigned DNA
gaattcgccctttctacggctgcgtcaactggaccaatgagaactttcccttcaacgattgcgtcgacaagatggtgatctggtgggaggagggcaagatgacggccaaggtcgtggagtccgccaaggccattctcggcggcagcaaggtgcgcgtggaccaaaagtgcaagtcgtccgcccagatcgaccccacccccgtgatcgtcacctccaacaccaacatgtgcgccgtgattgacgggaacagcaccaccttcgagcaccagcagccgttacaagaccggatgttcaaatttgaactcacccgccgtctggagcacgactttggcaaggtgacaaagcaggaagtcaaagagttcttccgctgggcgcaggatcacgtgaccgaggtggcgcatgagttctacgtcagaaagggtggagccaacaagagacccgcccccgatgacgcggataaaagcgagcccaagcgggcctgcccctcagtcgcggatccatcgacgtcagacgcggaaggagctccggtggactttgccgacaggtaccaaaacaaatgttctcgtcacgcgggcatgcttcagatgctgtttccctgcaagacatgcgagagaatgaatcagaatttcaacatttgcttcacgcacgggaccagagactgttcagaatgtttccccggcgtgtcagaatctcaaccggtcgtcagaaagaggacgtatcggaaactctgtgccattcatcatctgctggggcgggctcccgagattgcttgctcggcctgcgatctggtcaacgtggacctggatgactgtgtttctgagcaataaatgacttaaaccaggtatggctgccgatggttatcttccagattggctcgaggacaacctctctgagggcatccgcgagtggtgggacttgaaacctggagccccgaaacccaaagccaaccagcaaaagcaggacgacggccggggtctggtgcttcctggctacaagtacctcggacccttcaacggactcgacaagggagagccggtcaacgaggcagacgccgcggccctcgagcacgacaaggcctacgacaagcagctcgagcagggggacaacccgtacctcaagtacaaccacgccgacgccgagtttcaggagcgtcttcaagaagatacgtcttttgggggcaacctcgggcgagcagtcttccaggccaagaagcgggttctcgaacctctcggtctggttgaggaaggcgctaagacggctcctggaaagaagagaccggtagagccatcaccccagcgttctccagactcctctacgggcatcggcaagacaggccagcagcccgcgaaaaagagactcaactttgggcagactggcgactcagagtcagtgcccgaccctcaaccaatcggagaaccccccgcaggcccctctggtctgggatctggtacaatggctgcaggcggtggcgctccaatggcagacaataacgaaggcgccgacggagtgggtagttcctcaggaaattggcattgcgattccacatggctgggcgacagagtcatcaccaccagcacccgaacctgggccctccccacctacaacaaccacctctacaagcaaatctccaacgggacatcgggaggaagcaccaacgacaacacctacttcggctacagcaccccctgggggtattttgactttaacagattccactgccacttctcaccacgtgactggcagcgactcatcaacaacaactggggattccggcccaagagactcaacttcaagctcttcaacatccaggtcaaggaggtcacgcagaatgaaggcaccaagaccatcgccaataaccttaccagcacgattcaggtctttacggactcggaataccagctcccgtacgtcctcggctctgcgcaccagggctgcctgcctccgttcccggcggacgtcttcatgattcctcagtacgggtacctgactctgaacaacggcagtcaggccgtgggccgttcctccttctactgcctggagtactttccttctcaaatgctgagaacgggcaacaactttgagttcagctaccagtttgaggacgtgccttttcacagcagctacgcgcacagccaaagcctggaccggctgacgaaccccctcatcgaccagtacctgtactacctggcccggacccagagcactacggggtccacaagggggctgcagttccatcaggctgggcccaacaccatggccgagcaatcaaagaactggctgcccggaccctgttatcggcagcagagactgtcaaaaaacatagacagcaacaacaacagtaactttgcctggaccggggccactaaataccatctgaatggtagaaattcattaaccaacccgggcgtagccatggccaccaacaaggacgacgaggaccagttctttcccatcaacggagtgctggtttttggcaaaacgggggctgccaacaagacaacgctggaaaacgtgctaatgaccagcgaggaggagatcaaaaccaccaatcccgtggctacagaagaatacggtgtggtctccagcaacctgcaatcgtctacggccggaccccagacacagactgtcaacagccagggggctctgcccggcatggtctggcagaaccgggacgtgtacctgcagggtcccatctgggccaaaattcctcacacggacggcaactttcacccgtctcccctgatgggcggatttggactcaaacacccgcctcctcaaattctcatcaagtatacttccaactactacaaatctacaaatgtggactttgctgtcaatactgagggtacttattcagagcctcgccccattggcacccgttacctcacccgtaacctgtaattgcctgttaatcaataaaccggttaattcgtttcagttgaactttggtctctgcgaagggcgaattc

SEQ ID NO: 442 - protein, 733 aa, Adeno-associated virus
MAADGYLPDWLEDNLSEGIREWWDLKPGAPKPKANQQKQDDGRGLVLPGYKYLGPFNGLDKGEPVNAADAAALEHDKAYDQQLKAGDNPYLRYNHADAEFQERLQEDTSFGGNLGRAVFQAKKRVLEPLGLVEEGAKTAPGKKRPIESPDSSTGIGKKGQQPAKKKLNFGQTGDSESVPDPQPIGEPPAGPSGLGSGTMAAGGGAPMADNNEGADGVGSSSGNWHCDSTWLGDRVITTSTRTWALPTYNNHLYKQISNGTSGGSTNDNTYFGYSTPWGYFDFNRFHCHFSPRDWQRLINNNWGFRPKRLNFKLFNIQVKEVTQNEGTKTIANNLTSTIQVFTDSEYQLPYVLGSAHQGCLPPFPADVFMIPQYGYLTLNNGSQAVGRSSFYCLEYFPSQMLRTGNNFEFSYQFEDVPFHSSYAHSQSLDRLMNPLIDQYLYYLSRTQSTGGTAGTQQLLFSQAGPNNMSAQAKNWLPGPCYRQQRVSTTVSQNNNSNFAWTGATKYHLNGRDSLVNPGVAMATHKGDEERFFPSSGVLMFGKQGAGKDNVDYSSVMLTSEEEIKTTNPVATEQYGVVADNLQQQNAAPIVGAVNSQGALPGMVWQNRDVYLQGPIWAKIPHTDGNFHPSPLMGGFGLKHPPPQILIKNTPVPADPPTTFSQAKLASFITQYSTGQVSVEIEWELQKENSKRWNPEIQYTSNYYKSTNVDFAVNTEGTYSEPRPIGTRYLTRSL

SEQ ID NO: 443 - DNA, 3113 bp, Adeno-associated virus
  source 1..3113: mol_type = unassigned DNA
gaattcgccctttctacggctgcgtcaactggaccaatgagaactttcccttcaacgattgcgtcgacaagatggtgatctggtgggaggagggcaagatgacggccaaggtcgtggagtccgccaaggccattctcggcggcagcaaggtgcgcgtggaccaaaagtgcaagtcgtccgcccagatcgatcccacccccgtgatcgtcacttccaacaccaacatgtgcgccgtgattgacgggaacagcaccaccttcgagcaccagcagccgttacaagaccggatgttcaaatttgaactcacccgccgtctggagcatgactttggcaaggtgacaaagcaggaagtcaaagagttcttccgctgggcgcaggatcacgtgaccgaggtggcgcatgagttctacgtcagaaagggtggagccaacaagagacccgcccccgatgacgcggataaaagcgagcccaagcgggcctgcccctcagtcgcggatccatcgacgtcagacgcggaaggagctccggtggactttgccgacaggtaccaaaacaaatgttctcgtcacgcgggcatgcttcagatgctgtttccctgcaagacatgcgagagaatgaatcagaatttcaacatttgcttcacgcacgggaccagagactgttcagaatgtttccccggcgtgtcagaatctcaaccggtcgtcagaaagaggacgtatcggaaactctgtgccattcatcatctgctggggcgggctcccgagattgcttgctcggcctgcgatctggtcaacgtggacctggatgactgtgtttctgagcaataaatgacttaaaccaggtatggctgccgatggttatcttccagattggctcgaggacaacctctctgagggcattcgcgagtggtgggacttgaaacctggagccccgaaacccaaagccaaccagcaaaagcaggacgacggccggggtctggtgcttcctggctacaagtacctcggacccttcaacggactcgacaagggggagcccgtcaacgcggcggacgcagcggccctcgagcacgacaaggcctacgaccagcagctcaaagcgggtgacaatccgtacctgcggtataaccacgccgacgccgagtttcaggagcgtcttcaagaagatacgtcttttgggggcaacctcgggcgagcagtcttccaggccaagaagcgggttctcgaacctctcggtctggttgaggaaggcgctaagacggctcctggaaagaagagacccatagaatcccccgactcctccacgggcatcggcaagaaaggccagcagcccgctaaaaagaagctcaactttgggcagactggcgactcagagtcagtgcccgaccctcaaccaatcggagaaccccccgcaggcccctctggtctgggatctggtacaatggctgcaggcggtggcgctccaatggcagacaataacgaaggcgccgacggagtgggtagttcctcaggaaattggcattgcgattccacatggctgggcgacagagtcatcaccaccagcacccgaacctgggccctccccacctacaacaaccacctctacaagcaaatctccaacgggacatcgggaggaagcaccaacgacaacacctacttcggctacagcaccccctgggggtattttgactttaacagattccactgccacttctcaccacgtgactggcagcgactcatcaacaacaactggggattccggcccaagagactcaacttcaagctcttcaacatccaggtcaaggaggtcacgcagaatgaaggcaccaagaccatcgccaataaccttaccagcacgattcaggtctttacggactcggaataccagctcccgtacgtcctcggctctgcgcaccagggctgcctgcctccgttcccggcggacgtcttcatgattcctcagtacgggtacctgactctgaacaacggcagtcaggccgtgggccgttcctccttctactgcctggagtactttccttctcaaatgctgagaacgggcaacaactttgagttcagctaccagtttgaggacgtgccttttcacagcagctatgcgcacagccaaagcctggaccggctgatgaaccccctcatcgaccagtacctgtactacctgtctcggactcagtccacgggaggtaccgcaggaactcagcagttgctattttctcaggccgggcctaataacatgtcggctcaggccaaaaactggctacccgggccctgctaccggcagcaacgcgtctccacgacagtgtcgcaaaataacaacagcaactttgcttggaccggtgccaccaagtatcatctgaatggcagagactctctggtaaatcccggtgtcgctatggcaacgcacaagggcgacgaagagcgattttttccatccagcggagtcttgatgtttgggaaacagggagctggaaaagacaacgtggactatagcagcgttatgctaaccagtgaggaagaaatcaaaaccaccaacccagtggccacagaacagtacggcgtggtggccgataacctgcaacagcaaaacgccgctcctattgtaggggccgtcaacagtcaaggagccttacctggcatggtctggcagaaccgggacgtgtacctgcagggtcctatctgggccaagattcctcacacggacggcaactttcatccttcgccgctgatgggaggctttggactgaaacacccgcctcctcagatcctgattaagaatacacctgttcccgcggatcctccaactaccttcagtcaagccaagctggcgtcgttcatcacgcagtacagcaccggacaggtcagcgtggaaattgaatgggagctgcagaaagagaacagcaagcgctggaacccagagattcagtatacttccaactactacaaatctacaaatgtggactttgctgtcaatactgagggtacttattcagagcctcgccccattggcacccgttacctcacccgtagcctgtaattgcctgttaatcaataaaccggttgattcgtttcagttgaactttggtctctgcgaagggcgaattc

SEQ ID NO: 444 - protein, 738 aa, Adeno-associated virus
MAADGYLPDWLEDNLSEGIREWWDLKPGAPKPKANQQKQDDGRGLVLPGYKYLGPFNGLDKGEPVNAADAAALEHDKAYDQQLKAGDNPYLRYNHADAEFQERLQEDTSFGGNLGRAVFQAKKRVLEPLGLVEEGAKTAPGKKRPVEPSPQRSPDSSTGIGKTGQQPAKKRLNFGQTGDSESVPDPQPIGEPPAGPSGLGSGTMAAGGGAPMADNNEGADGVGSSSGNWHCDSTWLGDRVITTSTRTWALPTYNNHLYKQISNGTSGGSTNDNTYFGYSTPWGYFDFNRFHCHFSPRDWQRLINNNWGFRPKRLNFKLFNIQVKEVTQNEGTKTIANNLTSTIQVFTDSEYQLPYVLGSAHQGCPPPFPADVFMIPQYGYLTLNNGSQAVGRSSFYCLEYFPSQMRRTGNNFEFSYQFEDVPFHSSYAHSQSLDRLMNPLIDQYLYYLSRTQSTGGTAGTQQLLFSQAGPNNMSAQAKNWLPGPCYRQQRVSTTLSQNNNSNFAWTGATKYHLNGRDSLVNPGVAMATHKDDEERFFPSSGVLMFGKQGAGKDNVDYSSVMLTSEEEIKTTNPVATEQYGVVADNLQQQNAAPIVGAVNSQGALPGMVWQNRDVYLQGPIWAKIPHTDGNFHPSPLMGGFGLKHPPPQILIKNTPVPADPPTTFSQAKLASFITQYSTGQVSVEIEWELQKENSKRWNPEIQYTSNYYKSTNVDFAVNTEGTYSEPRPIGTRYLTRNL

SEQ ID NO: 445 - DNA, 3128 bp, Adeno-associated virus
  source 1..3128: mol_type = unassigned DNA
gaattcgccctttctacggctgcgtcaactggaccaatgagaactttcccttcaacgattgcgtcgacaagatggtgatctggtgggaggagggcaagatgacggccaaggtcgtggagtccgccaaggccattctcggcggcagcaaggtgcgcgtggaccaaaagtgcaagtcgtccgcccagatcgaccccacccccgtgatcgtcacctccaacaccaacatgtgcgccgtgattgacgggaacagcaccaccttcgagcaccagcagccgttgcaggaccggatgttcaaatttgaactcacccgccgtctggagcatgactttggcaaggtgacaaagcaggaagtcaaagagttcttccgctgggcgcaggatcacgtgaccgaggtggcgcatgagttctacgtcagaaagggtggagccaacaagagacccgcccccgatgacgcggataaaagcgagcccaagcgggcctgcccctcagtcgcggatccatcgacgtcagacgcggaaggagctccggtggactttgccgacaggtaccaaaacaaatgttctcgtcacgcgggcatgcttcagatgctgtttccctgcaagacatgcgagagaatgaatcagaatttcaacatttgcttcacgcgcgggaccagagactgttcagaatgtttcccgggcgtgtcagaatctcaaccggtcgtcagaaagaggacgtatcggaaactctgtgccattcatcatctgctggggcgggctcccgagattgcttgctcggcctgcgatctggtcaacgtggacctggatgactgtgtttctgagcaataaatgacttaaaccaggtatggctgccgatggttatcttccagattggctcgaggacaacctctctgagggcattcgcgagtggtgggacttgaaacctggagccccgaaacccaaagccaaccagcaaaagcaggacgacggccggggtctggtgcttcctggctacaagtacctcggacccttcaacggactcgacaagggggagcccgtcaacgcggcggacgcagcggccctcgagcacgacaaggcctacgaccagcagctcaaagcgggtgacaatccgtacctgcggtataaccacgccgacgccgagtttcaggagcgtctgcaagaagatacgtcttttgggggcaacctcgggcgagcagtcttccaggccaagaagcgggttctcgaacctctcggtctggttgaggaaggcgctaagacggctcctggaaagaagagaccggtagagccatcaccccagcgttctccagactcctctacgggcatcggcaagacaggccagcagcccgcgaaaaagagactcaactttgggcagactggcgactcagagtcagtgcccgaccctcaaccaatcggagaaccccccgcaggcccctctggtctgggatctggtacaatggctgcaggcggtggcgctccaatggcagacaataacgaaggcgccgacggagtgggtagttcctcaggaaattggcattgcgattccacatggctgggcgacagagtcatcaccaccagcacccgaacctgggccctccccacctacaacaaccacctctacaagcaaatctccaacgggacatcgggaggaagcaccaacgacaacacctacttcggctacagcaccccctgggggtattttgactttaacagattccactgccacttctcaccacgtgactggcagcgactcatcaacaacaactggggattccggcccaagagactcaacttcaagctcttcaacatccaggtcaaggaggtcacgcagaatgaaggcaccaagaccatcgccaataaccttaccagcacgattcaggtctttacggactcggaataccagctcccgtacgtcctcggctctgcgcaccagggctgcccgcctccgttcccggcggacgtcttcatgattcctcagtacgggtacctgactctgaacaacggcagtcaggccgtgggccgttcctccttctactgcctggagtactttccttctcaaatgcggagaacgggcaacaactttgagttcagctaccagtttgaggacgtgccttttcacagcagctacgcgcatagccaaagcctggaccggctgatgaaccccctcatcgaccagtacctgtactacctgtctcggactcagtccacgggaggtaccgcaggaactcagcagttgctattttctcaggccgggcctaataacatgtcggctcaggccaaaaactggctacccgggccctgctaccggcagcaacgcgtctccacgacactgtcgcaaaataacaacagcaactttgcttggaccggtgccaccaagtatcatctgaatggcagagactctctggtaaatcccggtgtcgctatggcaacgcacaaggacgacgaagagcgattttttccatccagcggagtcttgatgtttgggaaacagggagctggaaaagacaacgtggactatagcagcgttatgctaaccagtgaggaagaaatcaaaaccaccaacccagtggccacagaacagtacggcgtggtggccgataacctgcaacagcaaaacgccgctcctattgtaggggccgtcaacagtcaaggagccttacctggcatggtctggcagaaccgggacgtgtacctgcagggtcctatctgggccaagattcctcacacggacggcaactttcatccttcgccgctgatgggaggctttggactgaaacacccgcctcctcagatcctgattaagaatacacctgttcccgcggatcctccaactaccttcagtcaagccaagctggcgtcgttcatcacgcagtacagcaccggacaggtcagcgtggaaattgaatgggagctgcagaaagagaacagcaagcgctggaacccagagattcagtatacttccaactactacaaatctacaaatgtggactttgctgtcaatactgagggtacttattcagagcctcgccccattggcacccgttacctcacccgtaacctgtaattgcctgttaatcaataaaccggttaattcgtttcagttgaactttggtctctgcgaagggcgaattc

SEQ ID NO: 446 - protein, 738 aa, Adeno-associated virus; identical to SEQ ID NO: 434

SEQ ID NO: 447 - DNA, 1933 bp, Adeno-associated virus
  misc_difference 1302: note = modified_base - a, c, t or g
  source 1..1933: mol_type = unassigned DNA
caaggcctacgaccagcagctcaaagcgggtgacaatccgtacctgcggtataaccacgccgacgccgagtttcaggagcgtcttcaagaagatacgtcttttgggggcaacctcgggcgagcagtcttccaggccaaaaagcgggttctcgaacctcttggtctggttgagacgccagctaagacggcacctggaaagaagcgaccggtagactcgccagactccacctcgggcatcggcaagaaaggccagcagcccgcgaaaaagagactcaactttgggcagactggcgactcagagtcagtccccgaccctcaaccaatcggagaaccaccagcaggcccctctggtctgggatctggtacaatggctgcaggcggtggcgcaccaatggctgacaataacgagggcgccgacggagtgggtaatgcctcaggaaattggcattgcgattccacatggctgggcgacagagtcatcaccaccagcacccgaacctgggccctgcccacctacaacaaccacctctacaagcaaatctccagtcagtcagcagggagcaccaacgataacgtctatttcggctacagcaccccctgggggtattttgacttcaacagattccattgccacttctcaccacgtgactggcagcgacttatcaacaacaactggggattccggcccaagaagctcaacttcaagctcttcaacatccaggtcaaggaggtcacgacgaatgacggtgtcacaaccatcgctaataaccttaccagcacggttcaggtcttttcggactcggaatatcaactgccgtacgtcctcggctccgcgcaccagggctgcctgcctccgttcccggcagacgtgttcatgattccgcagtacggatacctgactctgaacaatggcagccaatcggtaggccgttcctccttctactgcctggagtactttccttctcagatgctgagaacgggcaacaacttcacctttagctacaccttcgaggacgtgcctttccacagcagctacgcgcacagccagagtctggaccggctgatgaatcccctcatcgaccagtacctgtactacttggccagaacacagagcaacgcaggaggtactgctggcaatcgggaactgcagttttatcagggcggacctaccaccatggccgaacaagcaaagaactggctgcccggaccttgcttccggcaacagagagtatccaagacgctggatcaaaataacaacagcaactttgcctggactggtgccacaaaataccatttaaatgnaagaaattcattggttaatcccggtgtcgccatggcaacccacaaggacgacgaggaacgcttcttcccttcgagcggagttctaatttttggcaaaactggagcagctaataaaactacattagaaaacgtgctcatgacaaatgaagaagaaattcgtcctaccaacccggtagctaccgaggaatacgggattgtaagcagcaacttgcaggcggctagcaccgcagcccagacacaagttgttaacaaccagggagccttacctggcatggtctggcagaaccgggacgtgtacctgcaaggtcccatttgggccaagattcctcacacggacggcaactttcacccgtctcctctaatgggtggctttggactgaaacacccgcctccccagatcctgatcaaaaacacaccggtacctgctaatcctccagaagtgtttactcctgccaagtttgcttccttcatcacgcagtacagcaccgggcaagtcagcgttgagatcgagtgggagctgcagaaagagaacagcaagcgctggaacccagagattcagtacacctccaactttgacaaacagactggagtggactttgctgttgacagccagggtgtttactctgagcct

SEQ ID NO: 448 - protein, 733 aa, Adeno-associated virus
MAADGYLPDWLEDNLSEGIREWWDLKPGAPKPKANQQKQDDGRGLVLPGYKYLGPFNGLDKGEPVNAADAAALEHDKAYDQQLKAGDNPYLRYNHADAEFQERLQEDTSFGGNLGRAVFQAKKRVLEPLGLVEEGAKTAPGKKRPLESPQEPDSSSGIGKKGKQPAKKRLNFEEDTGAGDGPPEGSDTSAMSSDIEMRAAPGGNAVDAGQGSDGVGNASGDWHCDSTWSEGKVTTTSTRTWVLPTYNNHLYLRLGTTSNSNTYNGFSTPWGYFDFNRFHCHFSPRDWQRLINNNWGLRPKAMRVKIFNIQVKEVTTSNGETTVANNLTSTVQIFADSSYELPYVMDAGQEGSLSPFPNDVFMVPQYGYCGIVTGENQNQTDRNAFYCLEYFPSQMLRTGNNFEMAYNFGKVPFHSMYAYSQSPDRLMNPLLDQYLWHLQSTTSGETLNQGNAATTFGKIRSGDFAFYRKNWLPGPCVKQQRLSKTASQNYKIPASGGNALLKYDTHYTLNNRWSNIAPGPPMATAGPSDGDFSNAQLIFPGPSVTGNTTTSANNLLFTSEEEIAATNPRDTDMFGQIADNNQNATTAPITGNVTAMGVLPGMVWQNRDIYYQGPIWAKIPHADGHFHPSPLIGGFGLKHPPPQIFIKNTPVPANPATTFTAARVDSFITQYSTGQVAVQIEWEIEKERSKRWNPEVQFTSNYGNQSSMLWAPDTTGKYTEPRVIGSRYLTNHL

SEQ ID NO: 449 - DNA, 3105 bp, Adeno-associated virus
  source 1..3105: mol_type = unassigned DNA
gaattcgcccttgctgcgtcaactggaccaatgagaactttcccttcaacgattgcgtcgacaagatggtgatctggtgggaggagggcaagatgaccgccaaggtcgtggagtccgccaaggccattctgggcggaagcaaggtgcgcgtggaccaaaagtgcaagtcatcggcccagatcgaccccacgcccgtgatcgtcacctccaacaccaacatgtgcgccgtgatcgacgggaacagcaccaccttcgagcaccagcagccgctgcaggaccgcatgttcaagttcgagctcacccgccgtctggagcacgactttggcaaggtgaccaagcaggaagtcaaagagttcttccgctgggctcaggatcacgtgactgaggtggcgcatgagttctacgtcagaaagggcggagccaccaaaagacccgcccccagtgacgcggatataagcgagcccaagcgggcctgcccctcagttgcggagccatcgacgtcagacgcggaagcaccggtggactttgcggacaggtaccaaaacaaatgttctcgtcacgcgggcatgcttcagatgctgtttccctgcaagacatgcgagagaatgaatcagaatttcaacgtctgcttcacgcacggggtcagagactgctcagagtgcttccccggcgcgtcagaatctcaacccgtcgtcagaaaaaagacgtatcagaaactgtgcgcgattcatcatctgctggggcgggcacccgagattgcgtgttcggcccgcgatctcgtcaacgtggacttggatgactgtgtttctgagcaataaatgacttaaaccaggtatggctgctgacggttatcttccagattggctcgaggacaacctctctgagggcattcgcgagtggtgggacctgaaacctggagcccccaagcccaaggccaaccagcagaagcaggacgacggccggggtctggtgcttcctggctacaagtacctcggacccttcaacggactcgacaagggggagcccgtcaacgcggcggacgcagcggccctcgagcacgacaaggcctacgaccagcagctcaaagcgggtgacaatccgtacctgcggtataaccacgccgacgccgagtttcaggagcgtctgcaagaagatacgtcttttgggggcaacctcgggcgagcagtcttccaggccaagaagagggtactcgaacctctgggcctggttgaagaaggtgctaagacggctcctggaaagaagagaccgttagagtcaccacaagagcccgactcctcctcaggaatcggcaaaaaaggcaaacaaccagccaaaaagagactcaactttgaagaggacactggagccggagacggaccccctgaaggatcagataccagcgccatgtcttcagacattgaaatgcgtgcagcaccgggcggaaatgctgtcgatgcgggacaaggttccgatggagtgggtaatgcctcgggtgattggcattgcgattccacctggtctgagggcaaggtcacaacaacctcgaccagaacctgggtcttgcccacctacaacaaccacttgtacctgcggctcggaacaacatcaaacagcaacacctacaacggattctccaccccctggggatactttgactttaacagattccactgtcacttctcaccacgtgactggcaaagactcatcaacaacaactggggactacgaccaaaagccatgcgcgttaaaatcttcaatatccaagttaaggaggtcacaacgtcgaacggcgagactacggtcgctaataaccttaccagcacggttcagatatttgcggactcgtcgtatgagctcccgtacgtgatggacgctggacaagagggaagtctgtctcctttccccaatgacgtcttcatggtgcctcaatatggctactgtggcattgtgactggcgaaaatcagaaccagacggacagaaatgctttctactgcctggagtattttccttcacaaatgctgagaactggcaataactttgaaatggcttacaactttgggaaggtgccgttccactcaatgtatgcttacagccagagcccggacagactgatgaatcccctcctggaccagtacctgtggcacttacagtcgaccacctctggagagactctgaatcaaggcaatgcagcaaccacatttggaaaaatcaggagtggagactttgccttttacagaaagaactggctgcctgggccttgtgttaaacagcagagactctcaaaaactgccagtcaaaattacaagattcctgccagcgggggcaacgctctgttaaagtatgacacccactataccttaaacaaccgctggagcaacatagcgcctggacctccaatggcaacagctggaccttcagatggggacttcagcaacgcccagctcatcttccctggaccatcagtcaccggaaacacaacaacctcagcaaacaatctgttgtttacatcagaagaagaaattgctgccaccaacccaagagacacggacatgtttggtcagattgctgacaataatcagaatgctacaactgctcccataaccggcaacgtgactgctatgggagtgcttcctggcatggtgtggcaaaacagagacatttactaccaagggccaatttgggccaagatcccacacgcggacggacattttcatccttcaccgctaattggcggttttggactgaaacatccgcctccccagatatttatcaaaaacacccccgtacctgccaatcctgcgacaaccttcactgcagccagagtggactctttcatcacacaatacagcaccggccaggtcgctgttcagattgaatgggaaatcgaaaaggaacgctccaaacgctggaatcctgaagtgcagtttacttcaaactatgggaaccagtcttctatgttgtgggctcccgatacaactgggaagtatacagagccgcgggttattggctctcgttatttgactaatcatttgtaactgcctagttaatcaataaaccgtgtgattcgtttcagttgaactttggtctctgcgaagggcgaattc

SEQ ID NO: 450 - protein, 733 aa, Adeno-associated virus
MAADGYLPDWLEDNLSEGIREWWDLKPGAPKPKANQQKQDDGRGLVLPGYKYLGPFNGLDKGEPVNAADAAALEHDKAYDQQLKAGDNPYLRYNHADAEFQERLQEDTSFGGNLGRAVFQAKKRVLEPLGLVEEGAKTAPGKKRPLESPQEPDSSSGIGKKGKQPAKKRLNFEEDTGAGDGPPEGSDTSAMSSDIEMRAAPGGNAVDAGQGSDGVGNASGDWHCDSTWSEGKVTTTSTRTWVLPTYNNHLYLRLGTTSNSNTYNGFSTPWGYFDFNRFHCHFSPRDWQRLINNNWGLRPKAMRVKIFNIQVKEVTTSNGETTVANNLTSTVQIFADSSYELPYVMDAGQEGSLPPFPNDVFMVPQYGYCGIVTGENQNQTDRNAFYCLEYFPSQMLRTGNNFEMAYNFEKVPFHSMYAHSQSLDRLMNPLLDQYLWHLQSTTSGETLNQGNAATTFGKIRSGDFAFYRKNWLPGPCVKQQRFSKTASQNYKIPASGGNALLKYDTHYTLNNRWSNIAPGPPMATAGPSDGDFSNAQLIFPGPSVTGNTTTSANNLLFTSEEEIAATNPRDTDMFGQIADNNQNATTAPITGNVTAMGVLPGMVWQNRDIYYQGPIWAKIPHADGHFHPSPLIGGFGLKHPPPQIFIKNTPVPANPATTFTAARVDSFITQYSTGQVAVQIEWEIEKERSKRWNPEVQFTSNYGNQSSMLWAPDTTGKYTEPRVIGSRYLTNHL

SEQ ID NO: 451 - DNA, 3105 bp, Adeno-associated virus
  source 1..3105: mol_type = unassigned DNA
gaattcgcccttgctgcgtcaactggaccaatgagaactttcccttcaacgattgcgtcgacaagatggtgatctggtgggaggagggcaagatgaccgccaaggtcgtggagtccgccaaggccattctgggcggaagcaaggtgcgcgtggaccaaaagtgcaagtcatcggcccagatcgaccccacgcccgtgatcgtcacctccaacaccaacatgtgcgccgtgatcgacgggaacagcaccaccttcgagcaccagcagccgctgcaggaccgcatgttcaagttcgagctcacccgccgtctggagcacgactttggcaaggtgaccaagcaggaagtcaaagagttcttccgctgggctcaggatcacgtgactgaggtggcgcatgagttctacgtcagaaagggcggagccaccaaaagacccgcccccagtgacgcggatataagcgagcccaagcgggcctgcccctcagttgcggagccatcgacgtcagacgcggaagcaccggtggactttgcggacaggtaccaaaacaaatgttctcgtcacgcgggcatgcttcagatgctgtttccctgcaagacatgcgagagaatgaatcagaatttcaacgtctgcttcacgcacggggtcagagactgctcagagtgcttccccggcgcgtcagaatctcaacccgtcgtcagaaaaaagacgtatcagaaactgtgcgcgattcatcatctgctggggcgggcacccgagattgcgtgttcggcctgcgatctcgtcaacgtggacttggatgactgtgtttctgagcaataaatgacttaaaccaggtatggctgctgacggttatcttccagattggctcgaggacaacctctctgagggcattcgcgagtggtgggacctgaaacctggagcccccaagctcaaggccaaccagcagaagcaggacgacggccggggtctggtgcttcctggctacaagtacctcggacccttccacggactcgacaagggggagcccgtcaacgcggcggacgcagcggccctcgagcacgacaaggcctacgaccagcagctcaaagcgggtgacaatccgtacctgcggtataaccacgccgacgccgagtttcaggagcgtctgcaagaagatacgtcttttgggggcaacctcgggcgagcagtcttccaggccaagaagagggtactcgaaccactgggcctggttgaagaaggtgctaagacggctcctggaaagaagagaccgttagagtcaccacaagagcccgactcctcctcaggaatcggcaaaaaaggcaaacaaccagccaaaaagagactcaactttgaagaggacactggagccggagacggaccccctgaaggatcagataccagcgccatgtcttcagacattgaaatgcgtgcagcaccgggcggaaatgctgtcgatgcgggacaaggttccgatggagtgggtaatgcctcgggtgattggcattgcgattccacctggtctgagggcaaggtcacaacaacctcgaccagaacctgggtcttgcccacctacaacaaccacttgtacctgcggctcggaacaacatcaaacagcaacacctacaacggattctccaccccctggggatactttgactttaacagattccactgtcacttctcaccacgtgactggcaaagactcatcaacaacaactggggactacgaccaaaagccatgcgcgttaaaatcttcaatatccaagttaaggaggtcacaacgtcgaacggcgagactacggtcgctaataaccttaccagcacggttcagatatttgcggactcgtcgtatgagctcccgtacgtgatggacgctggacaagagggaagtctgcctcctttccccaatgacgtcttcatggtgcctcaatatggctactgtggcattgtgactggcgaaaatcagaaccagacggacagaaatgctttctactgcctggagtattttccttcacaaatgctgagaactggcaataactttgaaatggcttacaactttgagaaggtgccgttccactcaatgtatgctcacagccagagcctggacagactgatgaatcccctcctggaccagtacctgtggcacttacagtcgaccacctctggagagactctgaatcaaggcaatgcagcaaccacatttggaaaaatcaggagtggagactttgccttttacagaaagaactggctgcctgggccttgtgttaaacagcagagattctcaaaaactgccagtcaaaattacaagattcctgccagcgggggcaacgctctgttaaagtatgacacccactataccttaaacaaccgctggagcaacatagcgcctggacctccaatggcaacagctggaccttcagatggggacttcagcaacgcccagctcatcttccctggaccatcagtcaccggaaacacaacaacctcagcaaacaatctgttgtttacatcagaaggagaaattgctgccaccaacccaagagacacggacatgtttggtcagattgctgacaataatcagaatgctacaactgctcccataaccggcaacgtgactgctatgggagtgcttcctggcatggtgtggcaaaacagagacatttactaccaagggccaatttgggccaagatcccacacgcggacggacattttcatccttcaccgctaattggcggttttggactgaaacatccgcctccccagatatttatcaaaaacacccccgtacctgccaatcctgcgacaaccttcactgcagccagagtggactctttcatcacacaatacagcaccggccaggtcgctgttcagattgaatgggaaatcgaaaaggaacgctccaaacgccggaatcctgaagtgcagtttacttcaaactatgggaaccagtcttctatgttgtgggctcccgatacaactgggaagtatacagagccgcgggttattggctctcgttatttgactaatcatttgtaactgcctagttaatcaataaaccgtgtgattcgtttcagttgaactttggtctctgcgaagggcgaattc

SEQ ID NO: 452 - protein, 733 aa, Adeno-associated virus
MAADGYLPDWLEDNLSEGIREWWDLKPGAPKPKANQQKQDDGRGLVLPGYEYLGPFNGLDKGEPVNAADAAALEHDKAYDQQLKAGDNPYLRYNHADAEFQERLQEDTSFGGNLGRAVFQAKKRVLEPLGLVEEGAKTAPGKKRPLESPQEPDSSSGIGKKGKQPAKKRLNFEEDTGAGDGPPEGSDTSAMSSDIEMRAAPGGNAVDAGQGSDGVGNASGDWHCDSTWSEGKVTTTSTRTWVLPTYNNHLYLRLGTTSNSNTYNGFSTPWGYFDFNRFHCHFSPRDWQRLINNNWGLRPKAMRVKIFNIQVKEVTTSNGETTVANNLTSTVQIFADSSYELPYVMDAGQEGSLPPFPNDVFMVPQYGYCGIVTGENQNQTDRNAFYCLEYFPSQMLRTGNNFETAYNFEKVPFHSMYAHSQSLDGLMNPLLDQYLWHLQSTTSGETLNQGNAATTFGKIRSGDFAFYRKNWLPGPCVKQQRFSKTASQNYKIPASGGNALLKYDTHYTLNNRWSNIAPGPPMATAGPSDGDFSNAQLIFPGPSVTGNTTTSANNLLFTSEEEIAATNPRDTDMFGQIADNNQNATTAPITGNVTAMGVLPGMVWQNRDIYYQGPIWAKIPHADGHFHPSPLIGGFGLKHPPPQIFIKNTPVPAYPATTFTAARVDSFITQYSTGQVAVQIEWEIEKERSKRWNPEVQFTSNCGNQSSMLWAPDTTGKYTEPRVIGSRYLTNHL

SEQ ID NO: 453 - DNA, 3105 bp, Adeno-associated virus
  source 1..3105: mol_type = unassigned DNA
gaattcgcccttcgcagagaccaaagttcaactgaaacgaatcacacggtttattgattaactaggcagttacaaatgattagtcaaataacgagagccaataacccgcggctctgtatacttcccagttgtatcgggagcccacaacatagaagactggttcccacagtttgaagtaaactgcacttcaggattccagcgtttggagcgttccttttcgatttcccattcaatctgaacagcgacctggccggtgctgtattgtgtgatgaaagagtccactctggctgcagtgaaggttgtcgcaggataggcaggtacgggggtgtttttgataaatatctggggaggcggatgtttcagtccaaaaccgccaattagcggtgaaggatgaaaatgtccgtccgcgtgtgggatcttggcccaaattggcccttggtagtaaatgtctctgttttgccacaccatgccaggaagcactcccatagcagtcacgttgccggttatgggagcagttgtagcattctgattattgtcagcaatctgaccaaacatgtccgtgtctcttgggttggtggcagcaatttcttcttctgatgtaaacaacagattgtttgctgaggttgttgtgtttccggtgactgatggtccagggaagatgagctgggcgttgctgaagtccccatctgaaggtccagctgttgccattggaggtccaggcgctatgttgctccagcggttgtttaaggtatagtgggtgtcatactttaacagagcgttgcccccgctggcaggaatcttgtaattttgactggcagtttttgagaatctctgctgtttaacacaaggcccaggcagccagttctttctgtaaaaggcaaagtctccactcctgatttttccaaatgtggttgctgcattgccttgattcagagtctctccagaggtggtcgactgtaagtgccacaggtactggtccaggaggggattcatcagtccgtccaggctctggctgtgagcatacattgagtggaacggcaccttctcaaagttgtaagccgtttcaaagttattgccagttctcagcatttgtgaaggaaaatactccaggcagtagaaagcatttctgtccgtctggttctgattttcgccagtcacaatgccacagtagccatattgaggcaccatgaagacgtcattggggaaaggaggcagacttccctcttgtccagcgtccatcacgtacgggagctcatacgacgagtccgcaaatatctgaaccgtgctggtaaggttattagcgaccgtagtctcgccgttcgacgttgtgacctccttaacttggatattgaagattttaacgcgcatggcttttggtcgtagtccccagttgttgttgatgagtctttgccagtcacgtggtgagaagtgacagtggaatctgttaaagtcaaagtatccccagggggtggagaatccgttgtaggtgttgctgtttgatgttgttccgagccgcaggtacaagtggttgttgtaggtgggcaagacccaggttctggtcgaggttgttgtgaccttgccctcagaccaggtggaatcgcaatgccaatcacccgaggcattacccactccatcggaaccttgtcccgcatcgacagcatttccgcccggtgctgcacgcatttcaatgtctgaagacatggcgctggtatctgatccttcagggggtccgtctccggctccagtgtcctcttcaaagttgagtctctttttggctggttgtttgccttttttgccgattcctgaggaggagtcgggctcttgtggtgactctaacggtctcttctttccaggagccgtcttagcaccttcttcaaccaggcccagaggttcgagtaccctcttcttggcctggaagactgctcgcccgaggttgcccccaaaagacgtatcttcttgcagacgctcctgaaactcggcgtcggcgtggttataccgcaggtacggattgtcacccgctttgagctgctggtcgtaggccttgtcgtgctcgagggccgctgcgtccgccgcgttgacgggctcccccttgtcgagtccgttgaagggtccgaggtactcgtagccaggaagcaccagaccccggccgtcgtcctgcttctgctggttggccttgggcttgggggctccaggtttcaggtcccaccactcgcgaatgccctcagagaggttgtcctcgagccaatctggaagataaccgtcagcagccatacctggtttaagtcatttattgctcagaaacacagtcatccaagtccacgttgacgagatcgcaggccgaacacgcaatctcgggtgcccgccccagcagatgatgaatcgcgcacagtttctgatacgtcttttttctgacgacgggttgagattctgacgcgccggggaagcactctgagcagtctctgaccccgtgcgtgaagcagacgttgaaattctgattcattctctcgcatgtcttgcagggaaacagcatctgaagcatgcccgcgtgacgagaacatttgttttggtacctgtccgcaaggtccaccggtgcttccgcgtctgacgtcgatggctccgcaactgaggggcaggcccgcttgggctcgcttatatccgcgtcactgggggcgggtcttttggtggctccgccctttctgacgtagaactcatgcgccacctcagtcacgtgatcctgagcccagcggaagaactctttgacttcctgcttggtcaccttgccaaagtcgtgctccagacggcgggtgagctcgaacttgaacatgcggtcctgcagcggctgctggtgctcgaaggtggtgctgttcccgtcgatcacggcgcacatgttggtgttggaggtgacgatcacgggcgtggggtcgatctgggccgatgacttgcacttttggtccacgcgcaccttgcttccgcccagaatggccttggcggactccacgaccttggcggtcatcttgccctcctcccaccagatcaccatcttgtcgacgcaatcgttgaagggaaagttctcattggtccagttgacgcagcaagggcgaattc

SEQ ID NO: 454 - protein, 729 aa, Adeno-associated virus
MAADGYLPDWLEDNLSEGIREWWDLKPGAPKPKANQQKQDDGRGLVLPGYKYLGPFNGLDKGEPVNAADAAALEHDKAYDQQLKAGDNPYLRYNHADAEFQERLQEDTSFGGNLGRAVFQAKKRVLEPLGLVEEGAKTAPGKKRPIDSPDSSTGIGKKGQQPAKKKLNFGQTGDSESVPDPQPLGEPPAAPSSVGSGTMAAGGGAPMADNNEGADGVGNASGNWHCDSTWLGDRVITTSTRTWALPTYNNHLYKQISSSSSGATNDNHYFGYSTPWGYFDFNRFHCHFSPRDWQRLINNNWGFRPKKLRFKLFNIQVKEVTTNDGVTTIANNLTSTVQVFSDSEYQLPYVLGSAHQGCLPPFPADVFMIPQYGYLTLNNGSQSVGRSSFYCLEYFPSQMLRTGNNFEFSYSFEDVPFHSSYAHSQSLDRLMNPLIDQYLYYLARTQSTTGSTRELQFHQAGPNTMAEQSKNWLPGPCYRQQGLSKNLDFNNNSNFAWTAATKYHLNGRNSLTNPGIPMATNKDDEDQFFPINGVLVFGKTGAANKTTLENVLMTSEEEIKTTNPVATEEYGVVSSNLQPSTAGPQSQTINSQGALPGMVWQNRDVYLQGPIWAKIPHTDGNFHPSPLMGGFGLKHPPPQILIKNTPVPANPPEVFTPAKFASFITQYSTGQVSVEIEWELQKENSKRWNPEIQYTSNYAKSNNVEFAVNPDGVYTEPRPIGTRYLPRNL

SEQ ID NO: 455 - DNA, 3094 bp, Adeno-associated virus
  source 1..3094: mol_type = unassigned DNA
gaattcgcccttgctgcgtcaactggaccaagagaactttcccttcaacgattgcgtcgacaagatggtgatctggtgggaggagggcaagatgacggccaaggtcgtggagtccgccaaagccattctgggcggaagcaaggtgcgcgtcgaccaaaagtgcaagtcctcggcccagatcgatcccacccccgtgatcgtcacctccaacaccaacatgtgcgccgtgatcgacgggaacagcaccaccttcgagcaccagcagccgttgcaggaccggatgttcaaatttgaactcacccgccgtctggaacacgactttggcaaggtgaccaagcaggaagtcaaagagttcttccgctgggctagtgatcacgtgactgaggtgacgcatgagttctacgtcagaaagggcggagccagcaaaagacccgcccccgatgacgcggatataagcgagcccaagcgggcctgtccctcagtcacggacccatcgacgtcagacgcggaaggagctccggtggactttgccgacaggtaccaaaacaaatgttctcgtcacgcgggcatgcttcagatgctgtttccctgcaaaacgtgcgagagaatgaatcagaatttcaacatttgcttcacgcacggggtcagagactgtttagaatgtttccccggcgtgtcagaatctcaaccggtcgtcagaaaaaagacgtatcggaagctgtgtgcgattcatcatctgctggggcgggcacccgagattgcttgctcggcctgcgacctggtcaacgtggacctggacgactgtgtttctgagcaataaatgacttaaaccgggtatggctgccgatggttatcttccagattggctcgaggacaacctctctgagggcattcgcgagtggtgggacctgaaacctggagccccgaaacccaaagccaaccagcaaaagcaggacgacggccggggtctggtgcttcctggctacaagtacctcggacccttcaacggactcgacaagggggagcccgtcaacgcggcggacgcagcggccctcgagcacgacaaggcctacgaccagcagctcaaagcgggtgacaatccgtacctgcggtataaccacgccgacgccgagtttcaggagcgtctgcaagaagatacgtcatttgggggcaacctcgggcgagcagtcttccaggccaagaagcgggttctcgaacctctcggtctggttgaggaaggcgctaagacggctcctggaaagaagagacccatagactctccagactcctccacgggcatcggcaaaaaaggccagcagcccgctaaaaagaagctcaattttggtcagactggcgactcagagtcagtccccgaccctcaacctcttggagaacctccagcagcgccctctagtgtgggatctggtacaatggctgcaggcggtggcgcaccaatggcagacaataacgaaggtgccgacggagtgggtaatgcctcaggaaattggcattgcgattccacatggctgggcgacagagtcatcaccaccagcaccagaacctgggccctccccacctacaacaaccacctctacaagcaaatctccagcagcagctcaggagccaccaatgacaaccactacttcggctacagcaccccctgggggtattttgactttaacagattccactgccacttctcaccacgtgactggcagcgactcatcaacaacaactggggattccggcccaagaagctgcggttcaagctcttcaacatccaggtcaaggaggtcacaacgaatgacggcgtcacgaccatcgctaataaccttaccagcacggttcaggtcttctcggactcggaataccagctgccgtacgtcctcggctctgcgcaccagggctgcctgcctccgttcccggcggacgtcttcatgattcctcagtacggctacctgactctgaacaacggcagccaatcggtgggccgttcctccttctactgcctggaatatttcccctctcaaatgctgagaacgggcaacaactttgagttcagttacagcttcgaggacgtgcctttccacagcagctacgcgcacagccagagcctagaccggctgatgaaccctctcatcgaccagtacctgtactacctggcccggacccagagcaccacgggttccaccagggaactgcaatttcatcaagctgggcccaatactatggccgagcagtcaaagaactggctgcctggaccctgctataggcaacagggactgtcaaagaacttggactttaacaacaacagcaattttgcctggactgctgccactaaatatcatctgaatggcagaaactctttgaccaatcctggcattcccatggcaaccaacaaggatgatgaggaccagttctttcccatcaacggggtactggtttttggcaagacgggagctgccaacaaaactacgctggaaaacgttctgatgaccagcgaggaggagatcaagaccactaaccctgtggctacagaagaatacggtgtggtctccagcaacctgcagccgtctacagccgggcctcaatcacagactatcaacagccagggagcactgcctggcatggtctggcagaaccgggacgtgtatctgcagggtcccatctgggccaaaattcctcacacggatggcaactttcacccgtctcctctgatgggcggttttggactcaaacacccgcctccacagatcctgatcaaaaacacacctgtacctgctaatcctccggaggtgtttactcctgccaagtttgcctccttcatcacgcagtacagcaccggacaagtcagcgtggaaatcgagtgggagctgcagaaagaaaacagcaagcgctggaacccagaaattcagtatacttccaattatgccaagtctaataatgttgaatttgctgtgaaccctgatggtgtttatactgagcctcgccccattggcactcgttacctcccccgtaatctgtaattgcttgttaatcaataaaccggttgattcgtttcagttgaactttggtctctgcgaagggcgaattc

SEQ ID NO: 456 - protein, 1458 aa, Adeno-associated virus
MAADGYLPDWLEDNLSEGIREWWDLKPGAPKPKANQQKQDDGRGLVLPGYKYLGPFNGLDKGEPVNAADAAALEHDKAYDQQLKAGDNPYLRYNHADAEFQERLQEDTSFGGNLGRAVFQAKKRVLEPLGLVEEGAKTAPGKKRPIDSPDSSTGIGKKGQQPAKKKLNFGQTGDSESVPDPQPLGEPPAAPSSVGSGTMAAGGGAPTADNNEGADGVGNASGNWHCDSTWLGDRVITTSTRTWALPTYNNHLYKQISSSSSGATNDNHYFGYSTPWGYFDFNRFHCHFSPRDWQRLINNNWGFRPKKLRFKLFNIQVKEVTTNDGVTTIANNLTSTVQVFSDSEYQLPYVLGSAHQGCLPPFPADVFMIPQYGYLTLNNGSQSVGRSSFYCLEYFPSQMLRTGNNFEFSYSFEDVPFHSSYAHSQSLDRLMNPLIDQYLYYLARTQSTTGSTRELQFHQAGPNTMAEQSKNWLPGPCYRQQRLSKNLDFNNNSNFAWTAATKYHLNGRNSLTNPGIPMATNKDDEDQFFPINGVLVFGKTGAANKTTLENVLMTSEEEIKTTNPVATEEYGVVSSNLQSSTAGPQSQTINSQGALPGMVWQNRDVYLQGPIWAKIPHTDGNFHPSPLMGGFGLEHPPPQILIKNTPVPANPPEVFTPAKFASFITQYSTGQVSVEIEWELQKENSKRWNPEIQYTSNYAKSNNVEFAVNPDGVYTEPRPIGTRYLTRNLMAADGYLPDWLEDNLSEGIREWWDLKPGAPKPKANQQKQDDGRGLVLPGYKYLGPFNGLDKGEPVNAADAAALEHDKAYDQQLKAGDNPYLRYNHADAEFQERLQEDTSFGGNLGRAVFQAKKRVLEPLGLVEEGAKTAPGKKRPIGSPDSSTGIGKKGQQPAKKKLNFGQTGDSESVPDPQPLGEPPAAPSSVGSGTMAAGGGAPMADNNEGADGVGNASGNWHCDSTWLGDRVITTSTRTWALPTYNNHLYKQISSSSSGATNDNHYFGYSTPWGYFDFNRFHCHFSPRDWQRLINNNWGFRPKKLRFKLLNIQVKEVTTNDGVTTIANNLTSTVQVFSDSEYQLPYVLGSAHQGCLPPFPADVFMIPQYGYLTLDNGSQSVGRSSFYCLEYFPSQMLRTGNNFEFSYSFEDVPFHSSYAHSQSLDRLMNPLIDQYLYYLARTQSTTGSTRELQFHQAGPNTMAEQSKNWLPGPCYRQQRLSKNLDFNNNSNFAWTAATKYHLNGRNSLTNPGIPMATNKDDEDQFFPINGVLVFGKTGAANKTTLENVLMTSEEEIKTTNPVATEEYGVVSSNLQSSTAGPQSQTINSQGALPGMVWQNRDVYLQGPIWAKIPHTDGNFHPSPLMGGFGLKHPPPQILIKNTPVPANPPEVFTPAKFASFITQYSTGQVSVEIEWELQKENSKRWNPEIQYTSNYAKSNNVEFAVNPDGVYTEPRPIGTRYLTRNL

SEQ ID NO: 457 - DNA, 3095 bp, Adeno-associated virus
  source 1..3095: mol_type = unassigned DNA
gaattcgcccttcgcagagaccaaagttcaactgaaacgaatcaaccggtttattgattaacaagcaattacagattacgggtgaggtaacgagtgccaatggggcgaggctcagtataaacaccatcagggttcacagcaaattcaacattattagacttggcataattggaagtatactgaatttctgggttccagcgcttgctgttttctttctgcagctcccactcgatttccacgctgacttgtccggtgctgtactgcgtgatgaaggaggcaaacttggcaggagtaaacacctccggaggattagcaggtacaggtgtgtttttgatcaggatctgtggaggcgggtgtttgagtccaaaaccgcccatcagaggagacgggtgaaagttgccatccgtgtgaggaattttggcccagatgggaccctgcagatacacgtcccggttctgccagaccatgccaggcagtgctccctggctgttgatagtctgtgattgaggcccggctgtagacgactgcaggttgctggagaccacaccgtattcttctgtagccacagggttagtggtcttgatctcctcctcgctggtcatcagaacgttttccagcgtagttttgttggcagctcccgtcttgccaaaaaccagtaccccgttgatgggaaagaactggtcctcatcatccttgttggttgccatgggaatgccaggattggtcaaagagtttctgccattcagatgatatttagtggcagcagtccaggcaaaattgctgttgttgttaaagtccaagttctttgacagtctctgttgcctatagcagggtccaggcagccagttctttgactgctcggccatagtattgggcccagcttgatgaaattgcagttccctggtggaacccgtggtgctctgggtccgggccaggtagtacaggtactggtcgatgagagggttcatcagccggtctaggctctggctgtgcgcgtagctgctgtggaaaggcacgtcctcgaagctgtaactgaactcaaagttgttgcccgttctcagcatttgagaggggaaatattccaggcagtagaaggaggaacggcccaccgattggctgccgttgtccagagtcaggtagccgtactgaggaatcatgaagacgtccgccgggaacggaggcaggcagccctggtgcgcagagccgaggacgtacggcagctggtattccgagtccgagaagacctgaaccgtgctggtaaggttattagcgatggtcgtgacgccgtcattcgttgtgacctccttgacctggatgttgaggagcttgaaccgcagcttcttgggccggaatccccagttgttgttgatgagtcgctgccagtcacgtggtgagaagtggcagtggaatctgttaaagtcaaaatacccccagggggtgctgtagccgaagtagtggttgtcattggtggctcctgagctgctgctggagatttgcttgtagaggtggttgttgtaggtggggagggcccaggttctggtgctggtggtgatgactctgtcgcccagccatgtggaatcgcaatgccaatttcctgaggcattacccactccgtcggcaccttcgttattgtctgccattggtgcgccaccgcctgcagccattgtaccagatcccacactagagggcgctgctggaggttctccaagaggttgagggtcggggactgactctgagtcgccagtctgaccaaaattgagcttctttttagcgggctgctggccttttttgccgatgcccgtggaggagtctggagagcctatgggtctcttctttccaggagccgtcttagcgccttcctcaaccagaccgagaggttcgagaacccgcttcttggcctggaagactgctcgcccgaggttgcccccaaatgacgtatcttcttgcagacgctcctgaaactcggcgtcggcgtggttataccgcaggtacggattgtcacccgctttgagctgctggtcgtaggccttgtcgtgctcgagggccgctgcgtccgccgcgttgacgggctcccccttgtcgagtccgttgaagggtccgaggtacttgtagccaggaagcaccagaccccggccgtcgtcctgcttttgctggttggctttgggtttcggggctccaggtttcaggtcccaccactcgcgaatgccctcagagaggttgtcctcgagccaatctggaagataaccatcggcagccatacctggtttaagtcatttattgctcagaaacacagtcgtccaggtccacgttgaccaggtcgcaggccgagcaagcaatctcgggtgcccgccccagcagatgatgaatcgcacacagcttccgatacgtcttttttctgacgaccggttgagattctgacacgccggggaaacattctaaacagtctctgaccccgtgcgtgaagcaaatgttgaaattctgattcattctctcgcacgttttgcagggaaacagcacctgaagcatgcccgcgtgacgagaacatttgttttggtacctgtcggcaaagtccaccggagctccttccgcgtctgacgtcgatgggtccgtgactgagggacgggcccgcttgggctcgcttatatccgcgtcatcgggggcgggtcttttgctggctccgccctttctgacgtagaactcatgcgtcacctcagtcacgtgatcactagcccagcggaagaactctttgacttcctgctttgtcaccttgccaaagtcgtgttccagacggcgggtgagttcaaatttgaacatccggtcctgcaacggttgctggtgctcgaaggtggtgctgttcccgtcgatcacggcgcacatgttggtgttggaggtgacgatcacgggggtgggatcgatctgggcggacgacttgcacttttggtccacgcgcaccttgctgccgccgagaatggccttggcggactccacgaccttggccgtcatcttgccctcctcccaccagatcaccatcttgtcgacgcaatcgttgaagggaaagttctcattggtccagttgacgcagcaagggcgaattc

SEQ ID NO: 458 - DNA, 3095 bp, Adeno-associated virus
  source 1..3095: mol_type = unassigned DNA
gaattcgcccttcgcagagaccaaagttcaactgaaacgaatcaaccggtttattgattaacaagcaattacagattacgggtgaggtaacgagtgccaatggggcgaggctcagtataaacaccatcagggttcacagcaaattcaacattattagacttggcataattggaagtatactgaatttctgggttccagcgcttgctgttttctttctgcagctcccactcgatttccacgctgacttgtccggtgctgtactgcgtgatgaaggaggcaaacttggcaggagtaaacacctccggaggattagcaggtacaggtgtgtttttgatcaggatctgtggaggcgggtgttcgagtccaaaaccgcccatcagaggagacgggtgaaagttgccatccgtgtgaggaattttggcccagatgggaccctgcagatacacgtcccggttctgccagaccatgccaggcagtgctccctggctgttgatagtctgtgattgaggcccggctgtagacgactgcaggttgctggagaccacaccgtattcttctgtagccacagggttagtggtcttgatctcctcctcgctggtcatcagaacgttttccagcgtagttttgttggcagctcccgtcttgccaaaaaccagtaccccgttgatgggaaagaactggtcctcatcatccttgttggttgccatgggaatgccaggattggtcaaagagtttctgccattcagatgatatttagtggcagcagtccaggcaaaattgctgttgttgttaaagtccaagttctttgacagtctctgttgcctatagcagggtccaggcagccagttctttgactgctcggccatagtattgggcccagcttgatgaaattgcagttccctggtggaacccgtggtgctctgggtccgggccaggtagtacaggtactggtcgatgagagggttcatcagccggtctaggctctggctgtgcgcgtagctgctgtggaaaggcacgtcctcgaagctgtaactgaactcaaagttgttgcccgttctcagcatttgagaggggaaatattccaggcagtagaaggaggaacggcccaccgattggctgccgttgttcagagtcaggtagccgtactgaggaatcatgaagacgtccgccgggaacggaggcaggcagccctggtgcgcagagccgaggacgtacggcagctggtattccgagtccgagaagacctgaaccgtgctggtaaggttattagcgatggtcgtgacgccgtcattcgttgtgacctccttgacctggatgttgaagagcttgaaccgcagcttcttgggccggaatccccagttgttgttgatgagtcgctgccagtcacgtggtgagaagtggcagtggaatctgttaaagtcaaaatacccccagggggtgctgtagccgaagtagtggttgtcattggtggctcctgagctgctgctggagatttgcttgtagaggtggttgttgtaggtggggagggcccaggttctggtgctggtggtgatgactctgtcgcccagccatgtggaatcgcaatgccaatttcctgaggcattacccactccgtcggcaccttcgttattgtctgccgttggtgcgccaccgcctgcagccattgtaccagatcccacactagagggcgctgctggaggttctccaagaggttgagggtcggggactgactctgagtcgccagtctgaccaaaattgagcttctttttagcgggctgctggccttttttgccgatgcccgtggaggagtctggagagtctatgggtctcttctttccaggagccgtcttagcgccttcctcaaccagaccgagaggttcgagaacccgcttcttggcctggaagactgctcgcccgaggttgcccccaaatgacgtatcttcttgcaggcgctcctgaaactcggcgtcggcgtggttataccgcaggtacggattgtcacccgctttgagctgctggtcgtaggccttgtcgtgctcgagggccgctgcgtccgccgcgttgacgggctcccccttgtcgagtccgttgaagggtccgaggtacttgtagccaggaagcaccagaccccggccgtcgtcctgcttttgctggttggctttgggtttcggggctccaggtttcaggtcccaccactcgcgaatgccctcagagaggttgtcctcgagccaatctggaagataaccatcggcagccatacctggtttaagccatttattgctcagaaacacagtcgtccaggtccacgttgaccaggtcgcaggccgagcaggcaatctcgggtgcccgccccagcagatgatgaatcgcacacagcttccgatacgtcttttttctgacgaccggttgagattctgacacgccggggaaacattctaaacagtctctgaccccgtgcgtgaagcaaatgttgaaattctgattcattctctcgcacgttttgcagggaaacagcatctgaagcatgcccgcgtggcgagaacatttgttttggtacctgtcggcaaagtccaccggagctccttccgcgtctgacgtcgatgggtccgtgactgagggacaggcccgcttgggctcgcttatatccgcgtcatcgggggcgggtcttttgctggctccgccctttctgacgtagaactcatgcgtcacctcagtcacgtgatcactagcccagcggaagaactctttgacttcctgctttgtcaccttgccaaagtcgtgttccagacggcgggtgagttcaaatttgaacatccggtcctgcaacggctgctggtgctcgaaggtggtgctgttcccgtcgatcacggcgcgcatgttggtgttggaggtgacgatcacgggggtgggatcgatctgggcggacgacttgcacttttggtccacgcgcaccttgctgccgccgagaatggccttggcggactccacgaccttggccgtcatcttgccctcctcccaccagatcaccatcttgtcgacgcaatcgttgaagggaaagttctcattggtccagttgacgcagcaagggcgaattc

SEQ ID NO: 459 - protein, 729 aa, Adeno-associated virus; identical to SEQ ID NO: 187

SEQ ID NO: 460 - protein, 729 aa, Adeno-associated virus
MAADGYLPDWLEDNLSEGIREWWDLKPGAPKPKANQQKQDDGRGLVLPGYKYLGPFNGLDKGEPVNAADAAALEHDKAYDQQLKAGDNPYLRYNHADAEFQERLQEDTSFGGNLGRAVFQAKKRVLEPLGLVEEGAKTAPGKKRPIDSPDSSTGIGKKGQQPAKKKLNFGQTGDSESVPDPQPLGEPPAAPSSVGSGTMAAGGGAPTADNNEGADGVGNASGNWHCDSTWLGDRVITTSTRTWALPTYNNHLYKQISSSSSGATNDNHYFGYSTPWGYFDFNRFHCHFSPRDWQRLINNNWGFRPKKLRFKLFNIQVKEVTTNDGVTTIANNLTSTVQVFSDSEYQLPYVLGSAHQGCLPPFPADVFMIPQYGYLTLNNGSQSVGRSSFYCLEYFPSQMLRTGNNFEFSYSFEDVPFHSSYAHSQSLDRLMNPLIDQYLYYLARTQSTTGSTRELQFHQAGPNTMAEQSKNWLPGPCYRQQRLSKNLDFNNNSNFAWTAATKYHLNGRNSLTNPGIPMATNKDDEDQFFPINGVLVFGKTGAANKTTLENVLMTSEEEIKTTNPVATEEYGVVSSNLQSSTAGPQSQTINSQGALPGMVWQNRDVYLQGPIWAKIPHTDGNFHPSPLMGGFGLKHPPPQILIKNTPVPANPPEVFTPAKFASFITQYSTGQVSVEIEWELQKENSKRWNPEIQYTSNYAKSNNVEFAVNPDGVYTEPRPIGTRYLTRNL

SEQ ID NO: 461 - protein, 729 aa, Adeno-associated virus
MAADGYLPDWLEDNLSEGIREWWDLKPGAPKPKANQQKQDDGRGLVLPGYKYLGPFNGLDKGEPVNAADAAALEHDKAYDQQLKAGDNPYLRYNHADAEFQERLQEDTSFGGNLGRAVFQAKKRVLEPLGLVEEGAKTAPGKKRPIDSPDSSTGIGKKGQQPAKKKLNFGQTGDSESVPDPQPLGEPPAAPSSVGSGTMAAGGGAPMADNNEGADGVGNASGNWHCDSTWLGDRVITTSTRTWALPTYNNHLYKQISSSSSGATNDNHYFGYSTPWGYFDFNRFHCHFSPRDWQRLINNNWGFRPKKLRFKLFNIQVKEVTTNDGVTTIANNLTSTVQVFSDSEYQLPYVLGSAHQGCLPPFPADVFMIPQYGYLTLNNGSQSVGRSSFYCLEYFPSQMLRTGNNFEFSYSFEDVPFHSSYAHSQSLDRLMNPLIDQYLYYLARTQSTTGSTRELQFHQAGPNTMAEQSKNWLPGPCYRQQRLSKNLDFNNNSNFAWTAATKYHLNGRNSLTNPGIPMATNKDDEDQFFPINGVLVFGKTGAANKTTLENVLMTSEEEIKTTNPVATEEYGVVSSNLQSSTAGPQSQTINSQGALPGMVWQNRDVYLQGPIWAKIPHTDGNFHPSPLMGGFGLKHPPPQILIKNTPVPANPPEVFTPAKFASFITQYSTGQVSVEIEWELQKENSKRWNPEIQYTSNYAKSNNVEFAVNPDGVYTEPRPIGTRYLTRNL

SEQ ID NO: 462 - DNA, 2217 bp, Adeno-associated virus
  source 1..2217: mol_type = unassigned DNA
atggctgctgacggttatcttccagattggctcgaggacaacctctctgagggcattcgcgagtggtgggacctgaaacctggagcccccaagcccaaggccaaccagcagaagcaggacgacggccggggtctggtgcttcctggctacaagtacctcggacccttcaacggactcgacaagggggagcccgtcaacgcggcggacgcagcggccctcgagcacgacaaggcctacgaccagcagctcaaagcgggtgacaatccgtacctgcggtataaccacgccgacgccgagtttcaggagcgtctacaagaagatacgtcttttgggggcaacctcgggcgagcagtcttccaggccaagaagcgggttctcgaacctctcggtctggttgaggaagctgctaagacggctcctggaaagaagagaccggtagaaccgtcacctcagcgttcccccgactcctccacgggcatcggcaagaaaggccagcggcccgctaaaaagagactgaactttggtcagactggcgactcagagtcagtccccgaccctcaaccaatcggagaaccaccagcaggcccctctggtctgggatctggtacaatggctgcaggcggtggcgctccaatggcagacaataacgaaggcgccgacggagtgggtagttcctcaggaaattggcattgcgattccacatggctgggcgacagagtcatcaccaccagcacccgaacctgggccctgcccacctacaacaaccacctctacaagcaaatatccaatgggacatcgggaggaagcaccaacgacaacacctacttcggctacagcaccccctgggggtattttgacttcaacagattccactgccacttctcaccacgtgactggcagcgactcatcaacaacaactggggattccggccaaaaagactcagcttcaagcccttcaacatccaggtcaaggaggtcacgcagaatgaaggcaccaagaccatcgccaataaccttaccagcacgattcaggtatttacggactcggaataccagctgccgtacgtcctcggctccgcgcaccagggctgcctgcctccgttcccggcggacgtcttcatgattccccagtacggctaccttacactgaacaatggaagtcaagccgtaggccgttcctccttctactgcctggaatattttccatctcaaatgctgcgaactggaaacaattttgaattcagctacaccttcgaggacgtgcctttccacagcagctacgcacacagccagagcttggaccgactgatgaatcctctcatcgaccagtacctgcactacttatccagaactcagtccacaggaggaactcaaggtacccagcaattgttattttctcaagctgggcctgcaaacatgtcggctcaggctaagaactggctacctggaccttgctaccggcagcagcgagtctctacgacactgtcgcaaaacaacaacagcaactttgcttggactggtgccaccaaatatcacctgaacggaagagactctttggtaaatcccggtgtcgccatggcaacccacaaggacgacgaggaacgcttcttcccgtcgagtggagtcctgatgtttggaaaacagggtgctggaagagacaatgtggactacagcagcgttatgctaaccagcgaagaagaaattaaaaccactaaccctgtagccacagaacaatacggtgtggtggctgacaacttgcagcaaaccaatacagggcctattgtgggaaatgtcaacagccaaggagccttacctggcatggtctggcagaaccgagacgtgtacctgcagggtcccatctgggccaagattcctcacacggacggcaacttccacccttcaccgctaatgggaggatttggactgaagcacccacctcctcagatcctgatcaagaacacgccggtacctgcggatcctccaacaacgttcagccaggcgaaattggcttccttcattacgcagtacagcaccggacaggtcagcgtggaaatcgagtgggagctgcagaaggagaacagcaaacgctggaacccagagattcagtacacttcaaactactacaaatctacaaatgtggactttgctgtcaatacagagggaacttattctgagcctcgccccattggtactcgctacctcacccgtaatctgtaa

SEQ ID NO: 463 - protein, 738 aa, Adeno-associated virus
MAADGYLPDWLEDNLSEGIREWWDLKPGAPKPKANQQKQDDGRGLVLPGYKYLGPFNGLDKGEPVNAADAAALEHDKAYDQQLKAGDNPYLRYNHADAEFQERLQEDTSFGGNLGRAVFQAKKRVLEPLGLVEEAAKTAPGKKRPVEPSPQRSPDSSTGIGKKGQRPAKKRLNFGQTGDSESVPDPQPIGEPPAGPSGLGSGTMAAGGGAPMADNNEGADGVGSSSGNWHCDSTWLGDRVITTSTRTWALPTYNNHLYKQISNGTSGGSTNDNTYFGYSTPWGYFDFNRFHCHFSPRDWQRLINNNWGFRPKRLSFKPFNIQVKEVTQNEGTKTIANNLTSTIQVFTDSEYQLPYVLGSAHQGCLPPFPADVFMIPQYGYLTLNNGSQAVGRSSFYCLEYFPSQMLRTGNNFEFSYTFEDVPFHSSYAHSQSLDRLMNPLIDQYLHYLSRTQSTGGTQGTQQLLFSQAGPANMSAQAKNWLPGPCYRQQRVSTTLSQNNNSNFAWTGATKYHLNGRDSLVNPGVAMATHKDDEERFFPSSGVLMFGKQGAGRDNVDYSSVMLTSEEEIKTTNPVATEQYGVVADNLQQTNTGPIVGNVNSQGALPGMVWQNRDVYLQGPIWAKIPHTDGNFHPSPLMGGFGLKHPPPQILIKNTPVPADPPTTFSQAKLASFITQYSTGQVSVEIEWELQKENSKRWNPEIQYTSNYYKSTNVDFAVNTEGTYSEPRPIGTRYLTRNL

SEQ ID NO: 464 - DNA, 2217 bp, Adeno-associated virus
  source 1..2217: mol_type = unassigned DNA
atggctgctgacggttatcttccagattggctcgaggacaacctctctgagggcattcgcgagtggtgggacctgaaacctggagcccccaagcccaaggccaaccagcagaagcaggacgacggccggggtctggtgcttcctggctacaagtacctcggacccttcaacggactcgacaagggggagcccgtcaacgcggcggacgcagcggccctcgagcacgacaaggcctacgaccagcagctcaaagcgggtgacaatccgtacctgcggtataaccacgccgacgccgagtttcaggagcgtctgcaagaagatacgtcttttgggggcaacctcgggcgagcagtcttccaggccaagaagcgggttctcgaacctctcggtctggttgaggaagctgctaagacggctcctggaaagaagagaccggtagaaccgtcacctcagcgttcccccgactcctccacgggcatcggcaagaaaggccagcagcccgctaaaaagagactgaactttggtcagactggcgactcagagtcagtccccgaccctcaaccaatcggagaaccaccagcaggcccctctggtctgggatctggtacaatggctgcaggcggtggcgctccaatggcagacaataacgaaggcgccgacggagtgggtagttcctcaggaaattggcattgcgattccacatggctgggcgacagagtcatcaccaccagcacccgaacctgggccctgcccacctacaacaaccacctctacaagcaaatatccaatgggacatcgggaggaagcaccaacgacaacacctacttcggctacagcaccccctgggggtattttgacttcaacagattccactgccacttctcaccacgtgactggcagcgactcatcaacaacaactggggattccggccaaaaagactcagcttcaagctcttcaacatccaggtcaaggaggtcacgcagaatgaaggcaccaagaccatcgccaataaccttaccagcacgattcaggtatttacggactcggaataccagctgccgtacgtcctcggctccgcgcaccagggctgcctgcctccgttcccggcggacgtcttcatgattccccagtacggctaccttacactgaacaatggaagtcaagccgtaggccgttcctccttctactgcctggaatattttccatctcaaatgctgcgaactggaaacaattttgaattcagctacaccttcgaggacgtgcctttccacagcagctacgcacacagccagagcttggaccgactgatgaatcctctcatcgaccagtacctgtactacttatccagaactcagtccacaggaggaactcaaggtacccagcaattgttattttctcaagctgggcctgcaaacatgtcggctcaggctaagaactggctacctggaccttgctaccggcagcagcgagtctctacgacactgtcgcaaaacaacaacagcaactttgcttggactggtgccaccaaatatcacctgaacggaagagactctttggtaaatcccggtgtcgccatggcaacccacaaggacgacgaggaacgcttcttcccgtcgagtggagtcctgatgtttggaaaacagggtgctggaagagacaatgtggactacagcagcgttatgctaaccagcgaagaagaaattaaaaccactaaccctgtagccacagaacaatacggtgtggtggctgataacttgcagcaaaccaatacggggcctattgtgggaaatgtcaacagccaaggagccttacctggcatggtctggcagaaccgagacgtgtacctgcagggtcccatctgggccaagattcctcacacggacggcaacttccacccttcaccgctaatgggaggatttggactgaagcacccacctcctcagatcctgatcaagaacacgccggtacctgcggatcctccaacaacgttcagccaggcgaaattggcttccttcattacgcagtacagcaccggacaggtcagcgtggaaatcgagtgggagctgcagaaggagaacagcaaacgctggaacccagagattcagtacacttcaaactactacaaatctacaaatgtggactttgctgtcaatacagagggaacttattctgagcctcgccccattggtactcgttacctcacccgtaatctgtaa

SEQ ID NO: 465 - protein, 738 aa, Adeno-associated virus; identical to SEQ ID NO: 117

SEQ ID NO: 466 - protein, 738 aa, Adeno-associated virus
MAADGYLPDWLEDNLSEGIREWWDLKPGAPKPKANQQKQDDGRGLVLPGYKYLGPFNGLDKGEPVNAADAAALEHDKAYDQQLKAGDNPYLRYNHADAEFQERLQEDTSFGGNLGRAVFQAKKRVLEPLGLVEEAAKTAPGKKRPVEPSPQRSPDSSTGIGKKGQQPAKKRLNFGQTGDSESVPDPQPIGEPPAGPSGLGSGTMAAGGGAPMADNNEGADGVGSSSGNWHCDSTWLGDRVITTSTRTWALPTYNNHLYKQISNGTSGGSTNDNTYFGYSTPWGYFDFNRFHCHFSPRDWQRLINNNWGFRPKRLSFKLFNIQVKEVTQDEGTKTIANNLTSTIQVFTDSEYQLPYVLGSAHQGCLPPFPADVFMIPQYGYLTLNNGSQAVGRSSFYCLEYFPSQMLRTGNNFEFSYTFEDVPFHSSYAHSQSLDRLMNPLIDQYLYYLSRTQSTGGTQGTQQLLFSQAGPANMSARAKNWLPGPCYRQQRVSTTLSQNNNSNFAWTGATKYHLNGRDSLVNPGVAMATHKDDEERFFPSSGVLMFGKQGAGRDNVDYSSVMLTSEEEIKTTNPVATEQYGVVADNLQQANTGPIVGNVNSQGALPGMVWQNRDVYLQGPIWAKIPHTDGNFHPSPLMGGFGLKHPPPQILIKNTPVPADPPTTFSQAKLASFITQYSTGQVSVEIEWELQKENSKRWNPEIQYTSNYYKSTNVDFAVNSEGTYSEPRPIGTRYLTRNL

SEQ ID NO: 467 - DNA, 2217 bp, Adeno-associated virus
  source 1..2217: mol_type = unassigned DNA
atggctgctgacggttatcttccagattggctcgaggacaacctctctgagggcattcgcgagtggtgggacctgaaacctggagcccccaagcccaaggccaaccagcagaagcaggacgacggccggggtctggtgcttcctggctacaagtacctcggacccttcaacggactcgacaagggggagcccgtcaacgcggcggacgcagcggccctcgagcacgacaaggcctacgaccagcagctcaaagcgggtgacaatccgtacctgcggtataaccacgccgacgccgagtttcaggagcgtctgcaagaagatacgtcttttgggggcaacctcgggcgagcagtcttccaggccaagaagcgggttctcgaacctctcggtctggttgaggaagctgctaagacggctcctggaaagaagagaccggtagaaccgtcacctcagcgttcccccgactcctccacgggcatcggcaagaaaggccagcagcccgctaaaaagagactgaactttggtcagactggcgactcagagtcagtccccgaccctcaaccaatcggagaaccaccagcaggcccctctggtctgggatctggtacaatggctgcaggcggtggcgctccaatggcagacaataacgaaggcgccgacggagtgggtagttcctcaggaaattggcattgcgattccacatggctgggcgacagagtcatcaccaccagcacccgaacctgggccctgcccacctacaacaaccacctctacaagcaaatatccaatgggacatcgggaggaagcaccaacgacaacacctacttcggctacagcaccccctgggggtattttgacttcaacagattccactgccacttctcaccacgtgactggcagcgactcatcaacaacaactggggattccggccaaaaagactcagcttcaagctcttcaacatccaggtcaaggaggtcacgcaggatgaaggcaccaagaccatcgccaataaccttaccagcacgattcaggtatttacggactcggaataccagctgccgtacgtcctcggctccgcgcaccagggctgcctgcctccgttcccggcggacgtcttcatgattccccagtacggctaccttacactgaacaatggaagtcaagccgtaggccgttcctccttctactgcctggaatattttccatctcaaatgctgcgaactggaaacaattttgaattcagctacaccttcgaggacgtgcctttccacagcagctacgcacacagccagagcttggaccgactgatgaatcctctcatcgaccagtacctgtactacttatccagaactcagtccacaggaggaactcaaggtacccagcaattgttattttctcaagctgggcctgcaaacatgtcggctcgggctaagaactggctacctggaccttgctaccggcagcagcgagtctctacgacactgtcgcaaaacaacaacagcaactttgcttggactggtgccaccaaatatcacctgaacggaagagactctttggtaaatcccggtgttgctatggcaacgcataaggacgacgaggaacgtttctttccatcgagcggagtcctgatgtttggaaaacagggtgctggaagagacaatgtggactatagcagcgttatgctaaccagcgaggaagaaattaaaaccactaaccctgtagccacagaacaatacggtgtggtggctgacaacttgcagcaagccaatacagggcctattgtgggaaatgtcaacagccaaggagccttacctggcatggtctggcagaaccgagacgtgtacctgcagggtcccatctgggccaaaattcctcacacggacggcaattttcacccgtctcctctgatgggcggctttggactgaagcacccacctccccagatcctgatcaagaatacgccggtacctgcggatcctccaacgacgttcagccaggcaaaattggcttccttcatcacgcagtacagcaccggccaggtcagcgtggagatcgagtgggagctgcagaaggagaacagcaagcgatggaacccagaaattcagtacacttccaactactacaaatctacaaatgtggactttgctgtcaattctgagggtacatattcagagcctcgccccattggtactcgttatctgacacgtaatctgtaa

SEQ ID NO: 468 - DNA, 2211 bp, Adeno-associated virus
  source 1..2211: mol_type = unassigned DNA
atggctgccgatggttatcttccagattggctcgaggacaacctctctgagggcattcgcgagtggtgggacttgaaacctggagccccgaaacccaaagccaaccagcaaaagcaggacgacggccggggcctggtgcttcctggctacaagtacctcggacccttcaacggactcgacaagggggagcccgtcaacgcggcggacgcagcggccctcgagcacgacaaggcctacgaccagcagctcgaagcgggtgacaatccgtacctgcggtataaccacgccgacgccgagtttcaggagcgtctgcaagaagatacgtcttttgggggcaacctcgggcgagcagtcttccaggccaagaagcgggttctcgaacctctcggtctggttgaggaaggcgctaagacggctcctggaaagaagagaccagtagagcagtcaccccaagaaccagactcctcctcgggcatcggcaagaaaggccaacagcccgccagaaaaagactcaattttggccagactggcgactcagagtcagttccagaccctcaacctctcggagaacctccagcagcgccctctggtgtgggacctaatacaatggctgcaggcggtggcgcaccaatggcagacaataacgaaggcgccgacggagtgggtagttcctcgggaaattggcattgcgattccacatggctgggcgacagagtcatcaccaccagcacccgaacctgggccctgcccacctacaacaaccacctctacaagcaaatctccaacgggacatcgggaggagccaccaacgacaacacctacttcggctacagcaccccctgggggtattttgactttaacagattccactgccacttttcaccacgtgactggcagcgactcatcaacaacaactggggattccggcccaagagactcagcttcaagctcttcaacatccaggtcaaggaggtcacgcagaatgaaggcaccaagaccatcgccaataacctcaccagcaccatccaggtgtttacggactcggagtaccagctgccgtacgttctcggctctgcccaccagggctgcctgcctccgttcccggcggacgtgttcatgattccccagtacggctacctaacactcaacaacggtagtcaggccgtgggacgctcctccttctactgcctggaatactttccttcgcagatgctgagaaccggcaacaacttccagtttacttacaccttcgaggacgtgcctttccacagcagctacgcccacagccagagcttggaccggctgatgaatcctctgattgaccagtacctgtactacttgtctcggactcaaacaacaggaggcacggcaaatacgcagactctgggcttcagccaaggtgggcctaatacaatggccaatcaggcaaagaactggctgccaggaccctgttaccgccaacaacgcgtctcaacgacaaccgggcaaaacaacaatagcaactttgcctggactgctgggaccaaataccatctgaatggaagaaattcattggctaatcctggcatcgctatggcaacacacaaagacgacgaggagcgttttttcccagtaacgggatcctgtttttggcaacaaaatgctgccagagacaatgcggattacagcgatgtcatgctcaccagcgaggaagaaatcaaaaccactaaccctgtggctacagaggaatacggtatcgtggcagataacttgcagcagcaaaacacggctcctcaaattggaactgtcaacagccagggggccttacccggtatggtctggcagaaccgggacgtgtacctgcagggtcccatctgggccaagattcctcacacggacggcaacttccacccgtctccgctgatgggcggctttggcctgaaacatcctccgcctcagatcctgatcaagaacacgcctgtacctgcggatcctccgaccaccttcaaccagtcaaagctgaactctttcatcacgcaatacagcaccggacaggtcagcgtggaaattgaatgggagctacagaaggaaaacagcaagcgctggaaccccgagatccagtacacctccaactactacaaatctacaagtgtggactttgctgttaatacagaaggcgtgtactctgaaccccgccccattggcacccgttacctcacccgtaatctgtaa

SEQ ID NO: 469 - protein, 736 aa, Adeno-associated virus
MAADGYLPDWLEDNLSEGIREWWDLKPGAPKPKANQQKQDDGRGLVLPGYKYLGPFNGLDKGEPVNAADAAALEHDKAYDQQLEAGDNPYLRYNHADAEFQERLQEDTSFGGNLGRAVFQAKKRVLEPLGLVEEGAKTAPGKKRPVEQSPQEPDSSSGIGKKGQQPARKRLNFGQTGDSESVPDPQPLGEPPAAPSGVGPNTMAAGGGAPMADNNEGADGVGSSSGNWHCDSTWLGDRVITTSTRTWALPTYNNHLYKQISNGTSGGATNDNTYFGYSTPWGYFDFNRFHCHFSPRDWQRLINNNWGFRPKRLSFKLFNIQVKEVTQNEGTKTIANNLTSTIQVFTDSEYQLPYVLGSAHQGCLPPFPADVFMIPQYGYLTLNNGSQAVGRSSFYCLEYFPSQMLRTGNNFQFTYTFEDVPFHSSYAHSQSLDRLMNPLIDQYLYYLSRTQTTGGTANTQTLGFSQGGPNTMANQAKNWLPGPCYRQQRVSTTTGQNNNSNFAWTAGTKYHLNGRNSLANPGIAMATHKDDEERFFPVTGSCFWQQNAARDNADYSDVMLTSEEEIKTTNPVATEEYGIVADNLQQQNTAPQIGTVNSQGALPGMVWQNRDVYLQGPIWAKIPHTDGNFHPSPLMGGFGLKHPPPQILIKNTPVPADPPTTFNQSKLNSFITQYSTGQVSVEIEWELQKENSKRWNPEIQYTSNYYKSTSVDFAVNTEGVYSEPRPIGTRYLTRNL

SEQ ID NO: 470 - DNA, 2214 bp, Adeno-associated virus
  source 1..2214: mol_type = unassigned DNA
atggctgctgacggttatcttccagattggctcgaggacaacctctctgagggcattcgcgagtggtgggacctgaaacctggagcccccaagcccaaggccaaccagcagaagcaggacgacggccggggtctggtgcttcctggctacaagtacctcggacccttcaacggactcgacaagggggagcccgtcagcgcggcggacgcagcggccctcgagcacgacaaggcctgcgaccagcggctcaaagcgggtgacaatccgtacctgcggtataaccacgccgacgccgagtttcaggagcgtctgcaagaagatacgtcttttgggggcaacctcgggcgagcagtcttccaggccaagaagcgggttctcgaacctctcggtctggttgaggaagctgctaagacggctcctggaaagaagggaccggtagaaccgtcacctcagcgttcccccgactcctccacgggcatcggcaagaaaggccagcagcccgctagaaagagactgaactttgggcagactggcgactcagagtcagtccccgaccctcaaccaatcggagaaccaccagcaggcccctctggtctgggatctggtacaatggctgcaggcggtggcgcaccaatggctgacaataacgagggcgccgacggagtgggtaatgcctcaggaaattggcattgcgattccacatggctgggcgacagagtcatcaccaccagcacccgaacctgggctttgcccacctacaacaatcacctctacaagcaaatctccagtcagtcagcaggtagcaccaacgacaacgtctacttcggctacagcaccccctgggggtattttgacttcaacagattccactgtcacttctcaccacgtgactggcagcggctcatcaacaacaactggggattccggcccaagaagctcaacttcaagctgttcaacatccaggtcaaggaggtcacaacgaatgacggcgtcacgaccatcgccaataaccttaccagcacggttcaggtcttttcggactcggaataccagctgccctacgtcctcggctccgcacaccagggctgcctgcctccgttcccggcggacgtcttcatgattccccagtacggctacctgactctgaacaatggcagccaatcggtgggtcgttcctctttctactgcctggaatatttcccttctcaaatgctgagaacgggcaacaacttcaccttcagctacaccttcgaggacgttcccttccacagcagctacgcacacagccagagcctggaccggctgatgaatcctcttatcgaccagtacctgtattacctggccagaacacagagcaacgcaggaggcacagctggcaatcgggaactgcagttttatcagggcgggcctaccaccatggccgaacaagccaaaaactggctgcctggaccttgcttccggcaacaaagagtctccaagacgctggatcaaaacaacaacagcaactttgcttggactggtgccaccaaataccatctaaatggaagaaattcattggttaatcccggtgtcgccatggcaacccacaaggacgacgaggaacgcttcttcccttcgagcggagtcctgatttttggaaaaactggagcagctaataagactacactggaaaatgtgttaatgacaaatgaagaggaaattcgtcctaccaacccggtagccaccgaggaatacgggactgttagcagcaacctgcaggcggctaacactgcagcccagacacaagttgtcaacaaccagggagccttacctggtatggtctggcagaaccgggacgtgtacctgcagggtcccatctgggccaagattcctcacacggacggcaactttcacccgtctccgctgatgggcggctttggactgaagcatccgcctcctcagatcctgatcaaaaacactcctgttcctgctaatcccccggaggtgtttacgcctgccaagtttgcttctttcatcacacagtacagcaccggccaggtcagcgtggagatcgagtgggagctgcagaaggagaacagcaagcgctggaacccagagattcagtatacctccaattttgacgaacagactggtgtggactttgccgttgacagccagggtgtttattctgagcctcgccccattggtactcgttacctcacccgtaatctgtaa

SEQ ID NO: 471 - protein, 737 aa, Adeno-associated virus
MAADGYLPDWLEDNLSEGIREWWDLKPGAPKPKANQQKQDDGRGLVLPGYKYLGPFNGLDKGEPVSAADAAALEHDKACDQRLKAGDNPYLRYNHADAEFQERLQEDTSFGGNLGRAVFQAKKRVLEPLGLVEEAAKTAPGKKGPVEPSPQRSPDSSTGIGKKGQQPARKRLNFGQTGDSESVPDPQPIGEPPAGPSGLGSGTMAAGGGAPMADNNEGADGVGNASGNWHCDSTWLGDRVITTSTRTWALPTYNNHLYKQISSQSAGSTNDNVYFGYSTPWGYFDFNRFHCHFSPRDWQRLINNNWGFRPKKLNFKLFNIQVKEVTTNDGVTTIANNLTSTVQVFSDSEYQLPYVLGSAHQGCLPPFPADVFMIPQYGYLTLNNGSQSVGRSSFYCLEYFPSQMLRTGNNFTFSYTFEDVPFHSSYAHSQSLDRLMNPLIDQYLYYLARTQSNAGGTAGNRELQFYQGGPTTMAEQAKNWLPGPCFRQQRVSKTLDQNNNSNFAWTGATKYHLNGRNSLVNPGVAMATHKDDEERFFPSSGVLIFGKTGAANKTTLENVLMTNEEEIRPTNPVATEEYGTVSSNLQAANTAAQTQVVNNQGALPGMVWQNRDVYLQGPIWAKIPHTDGNFHPSPLMGGFGLKHPPPQILIKNTPVPANPPEVFTPAKFASFITQYSTGQVSVEIEWELQKENSKRWNPEIQYTSNFDEQTGVDFAVDSQGVYSEPRPIGTRYLTRNL

SEQ ID NO: 472 - DNA, 2214 bp, Adeno-associated virus
  source 1..2214: mol_type = unassigned DNA
atggctgccgatggttatcttccagattggctcgaggacaacctctctgagggcattcgcgagtggtgggacctgaaacctggagccccgaaacccaaagccaaccagcaaaagcaggacgacggccggggtctggtgcttcctggctacaagtacctcggacccttcaacggactcgacaagggggagcccgtcaacgcggcggacgcagcggccctcgagcacgacaaggcctacgaccagcagctcaaagcgggtgacaatccgtacctgcggtataaccacgccgacgccgagtttcaggagcgtctgcaagaagatacgtcttttgggggcaacctcgggcgagcagtcttccaggccaagaagcgggttctcgaacctctcggtctggttgaggaagctgctaagacggctcctggaaagaagagaccggtagaaccgtcacctcagcgttcccccgactcctccacgggcatcggcaagaaaggccagcagcccgctagaaagagactgaactttgggcagactggcgactcagagtcagtccccgaccctcaaccaatcggagaaccaccagcaggcccctctggtctgggatctggtacaatggctgcaggcggtggcgctccaatggcagacaataacgaaggcgccgacggagtgggtaatgcctcaggaaattggcattgcgattccacatggctgggcgacagagtcatcaccaccagcacccgaacctgggctttgcccacctacaacaaccacctctacaagcaaatctccagtcagtcagcaggtagcaccaacgacaacgtctacttcggctacagcaccccctgggggtattttgacttcaacagattccactgtcacttctcaccacgtgactggcagcggctcatcaacaacaactggggattccggcccaagaagctcaacttcaagctgttcaacatccaggtcaaggaggtcacaacgaatgacggcgtcacgaccatcgccaataaccttaccagcacggttcaggtcttttcggactcggaataccagctgccctacgtcctcggctccgcacaccagggctgcctgcctccgttcccggcggacgtcttcatgattcctcagtacggctacctgactctcaacaacggtagtcaggccgtgggacgttcctccttctactgcctggagtacttcccctctcagatgctgagaacgggcaacaacttttccttcagctacactttcgaggacgtgcctttccacagcagctacgcgcacagccagagtttggacaggctgatgaatcctctcatcgaccagtacctgtactacctgtcaagaacccagtctacgggaggcacagcgggaacccagcagttgctgttttctcaggccgggcctagcaacatgtcgactcaggccagaaactggctgcctggaccctgctacagacagcagcgcgtctccacgacactgtcgcaaaacaacaacagcaactttgcctggactggtgccaccaagtatcatctgaacggcagagactctctggtgaatccgggcgtcgccatggcaaccaacaaggacgacgaggaccgcttcttcccatccagcggcatcctcatgtttggcaagcagggagctggaaaagacaacgtggactatagcaacgtgatgctaaccagcgaggaagaaatcaagaccaccaaccccgtggccacagaacagtatggcgtggtggctgataacctacagcagcaaaacaccgctcctattgtgggggccgtcaacagccagggagccttacctggcatggtctggcagaaccgggacgtgtacctgcagggtcctatttgggccaagattcctcacacagatggcaactttcacccgtctcctttaatgggcggctttggacttaaacatccgcctcctcagatccttatcaaaaacactcctgttcctgcggatcctccaacagcgttcaaccaggccaagctgaattctttcatcacgcagtacagcaccggacaagtcagcgtggagatcgagtgggagctgcagaaggagaacagcaagcgctggaacccagagattcagtatacttccaactactacaaatctacaaatgtggactttgctgttaatactgagggtgcttactctgagcctcgccccattggcactcgttacctcacccgtaatctgtaa

SEQ ID NO: 473 - protein, 737 aa, Adeno-associated virus
MAADGYLPDWLEDNLSEGIREWWDLKPGAPKPKANQQKQDDGRGLVLPGYKYLGPFNGLDKGEPVNAADAAALEHDKAYDQQLKAGDNPYLRYNHADAEFQERLQEDTSFGGNLGRAVFQAKKRVLEPLGLVEEAAKTAPGKKRPVEPSPQRSPDSSTGIGKKGQQPARKRLNFGQTGDSESVPDPQPIGEPPAGPSGLGSGTMAAGGGAPMADNNEGADGVGNASGNWHCDSTWLGDRVITTSTRTWALPTYNNHLYKQISSQSAGSTNDNVYFGYSTPWGYFDFNRFHCHFSPRDWQRLINNNWGFRPKKLNFKLFNIQVKEVTTNDGVTTIANNLTSTVQVFSDSEYQLPYVLGSAHQGCLPPFPADVFMIPQYGYLTLNNGSQAVGRSSFYCLEYFPSQMLRTGNNFSFSYTFEDVPFHSSYAHSQSLDRLMNPLIDQYLYYLSRTQSTGGTAGTQQLLFSQAGPSNMSTQARNWLPGPCYRQQRVSTTLSQNNNSNFAWTGATKYHLNGRDSLVNPGVAMATNKDDEDRFFPSSGILMFGKQGAGKDNVDYSNVMLTSEEEIKTTNPVATEQYGVVADNLQQQNTAPIVGAVNSQGALPGMVWQNRDVYLQGPIWAKIPHTDGNFHPSPLMGGFGLKHPPPQILIKNTPVPADPPTAFNQAKLNSFITQYSTGQVSVEIEWELQKENSKRWNPEIQYTSNYYKSTNVDFAVNTEGAYSEPRPIGTRYLTRNL

SEQ ID NO: 474 - DNA, 2217 bp, Adeno-associated virus
  source 1..2217: mol_type = unassigned DNA
atggctgccgatggttatcttccagattggctcgaggacaacctctctgagggcattcgcgagtggtgggacctgaaacctggagccccgaaacccaaagccaaccagcaaaagcaggacgacggccggggtctggtgcttcctggctacaagtacctcggacccttcaacggactcgacaagggggagcccgtcaacgcggcggacgcagcggccctcgagcacgacaaggcctacgaccagcagctcaaagcgggtgacaatccgtacctgcggtataatcacgccgacgccgagtttcaggagcgtctgcaagaagatacgtcttttgggggcaacctcgggcgagcagtcttccaggccaagaagcgggttctcgaacctctcggtctggttgaggaaggcgctaagacggctcctggaaagaagagaccggtagagccgtcaccacagcgttcccccgactcctccacgggcatcggcaagaaaggccagcagcccgccagaaagagactcaatttcggtcagactggcgactcagagtcagtccccgaccctcaacctatcggagaacctccagcagcgccctctagtgtgggatctggtacaatggctgcaggcggtggcgcaccaatggcagacaataacgaaggtgccgacggagtgggtagttcctcgggaaattggcattgcgattccacatggctgggcgacagagtcatcaccaccagcacccgaacctgggccctgcccacctacaacaaccacctctacaagcaaatctccaacgggacctcgggaggcagcaccaacgacaacacctactttggctacagcaccccctgggggtattttgactttaacagattccactgccacttctcaccacgtgactggcagcgactcatcaacaacaactggggattccggcccaagagactcagcttcaagctcttcaacatccaggtcaaagaggtcacgcagaatgaaggcaccaagaccatcgccaataacctcaccagcaccatccaggtgtttacggactcggaataccagctgccgtacgtcctcggctctgcccaccagggctgcctgcctccgttcccggcggacgtcttcatgattcctcagtacggctacctgactctcaacaacggtagtcaggccgtgggacgttcctccttctactgcctggagtacttcccctctcagatgctgagaacgggcaacaacttttccttcagctacactttcgaggacgtgcctttccacagcagctacgcgcacagccagagtttggacaggctgatgaatcctctcatcgaccagtacctgtactacctgtcaagaacccagtctacgggaggcacagcgggaacccagcagttgctgttttctcaggccgggcctagcaacatgtcggctcaggccagaaactggctgcctggaccctgctacagacagcagcgcgtctccacgacactgtcgcaaaacaacaacagcaactttgcctggactggtgccaccaagtatcatctgaacggcagagactctctggtgaatccgggcgtcgccatggcaaccaacaaggacgacgaggaccgcttcttcccatccagcggcatcctcatgtttggcaagcagggagctggaaaagacaacgtggactatagcaacgtgatgctaaccagcgaggaagaaatcaaggccaccaaccccgtggccacagaacagtatggcgtggtggctgataacctacagcagcaaaacaccgctcctattgtgggggccgtcaacagccagggagccttacctggcatggtctggcagaaccgggacgtgtacctgcagggtcctatttgggccaagattcctcacacagatggcaactttcacccgtctcctttaatgggcggctttggacttaaacatccgcctcctcagatcctcatcaaaaacactcctgttcctgcggatcctccaacagcgttcaaccaggccaagctgaattctttcatcacgcagtacagcaccggacaagtcagcgtggagatcgagtgggagctgcagaaggagaacagcaagcgctggaacccagagattcagtatacttccaactactacaaatctacaaatgtggactttgctgttaatactgagggtgtttactctgagcctcgccccattggcactcgttacctcacccgtaatctgtaa

SEQ ID NO: 475 - protein, 738 aa, Adeno-associated virus
MAADGYLPDWLEDNLSEGIREWWDLKPGAPKPKANQQKQDDGRGLVLPGYKYLGPFNGLDKGEPVNAADAAALEHDKAYDQQLKAGDNPYLRYNHADAEFQERLQEDTSFGGNLGRAVFQAKKRVLEPLGLVEEGAKTAPGKKRPVEPSPQRSPDSSTGIGKKGQQPARKRLNFGQTGDSESVPDPQPIGEPPAAPSSVGSGTMAAGGGAPMADNNEGADGVGSSSGNWHCDSTWLGDRVITTSTRTWALPTYNNHLYKQISNGTSGGSTNDNTYFGYSTPWGYFDFNRFHCHFSPRDWQRLINNNWGFRPKRLSFKLFNIQVKEVTQNEGTKTIANNLTSTIQVFTDSEYQLPYVLGSAHQGCLPPFPADVFMIPQYGYLTLNNGSQAVGRSSFYCLEYFPSQMLRTGNNFSFSYTFEDVPFHSSYAHSQSLDRLMNPLIDQYLYYLSRTQSTGGTAGTQQLLFSQAGPSNMSAQARNWLPGPCYRQQRVSTTLSQNNNSNFAWTGATKYHLNGRDSLVNPGVAMATNKDDEDRFFPSSGILMFGKQGAGKDNVDYSNVMLTSEEEIKATNPVATEQYGVVADNLQQQNTAPIVGAVNSQGALPGMVWQNRDVYLQGPIWAKIPHTDGNFHPSPLMGGFGLKHPPPQILIKNTPVPADPPTAFNQAKLNSFITQYSTGQVSVEIEWELQKENSKRWNPEIQYTSNYYKSTNVDFAVNTEGVYSEPRPIGTRYLTRNL

SEQ ID NO: 476 - DNA, 2217 bp, Adeno-associated virus
  source 1..2217: mol_type = unassigned DNA
atggctgccgatggttatcttccagattggctcgaggacaacctctctgagggcattcgcgagtggtgggacctgaaacctggagccccgaaacccaaagccaaccagcaaaagcaggacgacggccggggtctggtgcttcctggctacaagcacctcggacccttcaacggactcgacaagggggagcccgtcaacgcggcggacgcagcggccctcgagcacgacaaggcctacgaccagcagctcaaagcgggtgacaatccgtacctgcggtataatcacgctgacgccgagtttcaggagcgtctgcaagaagatacgtcttttgggggcaacctcgggcgagcagtcttccaggccaagaagcgggttctcgaacctctcggtctggttgaggaaggcgctaagacggctcctggaaagaagagaccggtagagccgtcaccacagcgttcccccgactcctccacgggcatcggcaagaaaggccagcagcccgccagaaagagactcaatttcggtcagactggcgactcagagtcagtccccgaccctcaacctatcggagaacctccagcagcgccctctagtgtgggatctggtacaatggctgcaggcggtggcgcaccaatggcagacaataacgaaggtgccgacggagtgggtagttcctcgggaaattggcattgcgattccacatggctgggcgacagagtcatcaccaccagcacccgaacctgggccctgcccacctacaacaaccacctctacaagcaaatctccaacgggacctcgggaggcagcaccaacgacaacacctactttggctacagcaccccctgggggtattttgactttaacagattccactgccacttctcaccacgtgactggcagcgactcatcaacaacaactggggattccggcccaagagactcagcttcaagctcttcaacatccaggtcaaagaggtcacgcagaatgaaggcaccaagaccatcgccaataaccttaccagcacggttcaggtcttttcggactcggaataccagctgccctacgtcctcggctccgcacaccagggctgcctgcctccgttcccggcggacgtcttcatgattccccagtacggctacctgactctgaacaatggcagccaatcggtgggtcgttcctctttctactgcctggaatatttcccttctcaaatgctgagaacgggcaacaacttcaccttcagctacaccttcgaggacgttcccttccacagcagctacgcacacagccagagcctggaccggctgatgaatcctcttatcgaccagtacctgtattacctggccagaacacagagcaacgcaggaggcacagctggcaatcgggaactgcagttttatcagggcgggcctaccaccatggccgaacaagccaaaaactggctgcctggaccttgcttccggcaacaaagagtctccaagacgctggatcaaaacaacaacagcaactttgcttggactggtgccaccaaataccatctaaatggaagaaattcattggttaatcccggtgtcgccatggcaacccacaaggacgacgaggaacgcttcttcccttcgagcggagtcctgatttttggaaaaactggagcagctaataagactacactggaaaatgtgttaatgacaaatgaagaggaaattcgtcctaccaacccggtagccaccgaggaatacgggactgttagcagcaacctgcaggcggctaacactgcagcccagacacaagttgtcaacaaccagggagccttacctggtatggtctggcagaaccgggacgtgtacctgcagggtcccatctgggccaagattcctcacacggacggcaactttcacccgtctccgctgatgggcggctttggactgaagcatccgcctcctcagatcctgatcaaaaacactcctgttcctgctaatcccccggaggtgtttacgcctgccaagtttgcttctttcatcacacagtacagcaccggccaggtcagcgtggagatcgagtgggagctgcagaaggagaacagcaagcgctggaacccagagattcagtatacctccaattttgacaaacagactggtgtggactttgccgttgacagccagggtgtttattctgagcctcgccccattggtactcgttacctcacccgtaatctgtaa

SEQ ID NO: 477 - protein, 738 aa, Adeno-associated virus
MAADGYLPDWLEDNLSEGIREWWDLKPGAPKPKANQQKQDDGRGLVLPGYKHLGPFNGLDKGEPVNAADAAALEHDKAYDQQLKAGDNPYLRYNHADAEFQERLQEDTSFGGNLGRAVFQAKKRVLEPLGLVEEGAKTAPGKKRPVEPSPQRSPDSSTGIGKKGQQPARKRLNFGQTGDSESVPDPQPIGEPPAAPSSVGSGTMAAGGGAPMADNNEGADGVGSSSGNWHCDSTWLGDRVITTSTRTWALPTYNNHLYKQISNGTSGGSTNDNTYFGYSTPWGYFDFNRFHCHFSPRDWQRLINNNWGFRPKRLSFKLFNIQVKEVTQNEGTKTIANNLTSTVQVFSDSEYQLPYVLGSAHQGCLPPFPADVFMIPQYGYLTLNNGSQSVGRSSFYCLEYFPSQMLRTGNNFTFSYTFEDVPFHSSYAHSQSLDRLMNPLIDQYLYYLARTQSNAGGTAGNRELQFYQGGPTTMAEQAKNWLPGPCFRQQRVSKTLDQNNNSNFAWTGATKYHLNGRNSLVNPGVAMATHKDDEERFFPSSGVLIFGKTGAANKTTLENVLMTNEEEIRPTNPVATEEYGTVSSNLQAANTAAQTQVVNNQGALPGMVWQNRDVYLQGPIWAKIPHTDGNFHPSPLMGGFGLKHPPPQILIKNTPVPANPPEVFTPAKFASFITQYSTGQVSVEIEWELQKENSKRWNPEIQYTSNFDKQTGVDFAVDSQGVYSEPRPIGTRYLTRNL

SEQ ID NO: 478 - protein, 737 aa, Adeno-associated virus
MAADGYLPDWLEDNLSEGIREWWDLKPGAPKPKANQQKQDDGRGLVLPGYKYLGPFNGLDKGEPVNAADAAALEHDKAYDQQLKAGDNPYLRYNHADAEFQERLQEDTSFGGNLGRAVFQAKKRVLEPLGLVEEAAKTAPGKKRPVEPSPQRSPDSSTGIGKKGQQPARKRLNFGQTGDSESVPDPQPIGEPPAGPSGLGSGTMAAGGGAPMADNNKGADGVGNASGNWHCDSTWLGDRVITTSTRTWALPTYNNHLYKQISSQSAGSTNDNVYFGYSTPWGYFDFNRFHCHFSPRDWQRLINSNWGFRPKKLNFKLFNIQVKEVTTNDGVTTIANNLTSTVQVFSDSEYQLPYVLGSAHQGCLPPFPADVFMIPQYGYLTLNNGSQSVGRSSFYCLEYFPSQMLRTGNNFTFSYTFEDVPFHSSYAHSQSLDRLMNPLIDQYLYYLARTQSNAGGTAGNRELQFYQGGPTTMAEQAKNWLPGPCFRQQRVSKTLDQNNNSNFAWTGATKYHLNGRNSLVNPGVAMATHKDDEERFFPSSGVLIFGKTGAANKTTLENVLMTNEEEIRPTNPVATEEYGTVSSNLQAANTAAQTQVVNNQGALPGMVWQNRDVYLQGPIWAKIPHTDGNFHPSPLMGGFGLKHPPPQILIKNTPVPANPPEVFTPAKFASFITQYSTGQVSVEIEWELQKENSKRWNPEIQYTSNFDKQTGVDFAVDSQGVYSEPRPIGTRYLTRNL

SEQ ID NO: 479 - protein, 737 aa, Adeno-associated virus
MAADGYLPDWLEDNLSEGIREWWDLKPGAPKPKANQQKQDDGRGLVLPGYKYLGPFNGLDKGEPVNAADAAALEHDKAYDQQLKAGDNPYLRYNHADAEFQERLQEDTSFGGNLGRAVFQAKKRVLEPLGLVEEAAKTAPGKKRPVEPSPQRSPDSSTGIGKKGQQPARKRLNFGQTGDSESVPDPQPIGEPPAGPSGLGSGTMAAGGGAPMADNNEGADGVGNASGNWHCDSTWLGDRVITTSTRTWALPTYNNHLYKQISSQSAGSTNDNVYFGYSTPWGYFDFNRFHCHFSPRDWQRLINSNWGFRPKKLNFKLFNIQVKEVTTNDGVTTIANNLTSTVQVFSDSEYQLPYVLGSAHQGCLPPFPADVFMIPQYGYLTLNNGSQSVGRSSFYCLEYFPSQMLRTGNNFTFSYTFEDVPFHSSYAHSQSLDRLMNPLIDQYLYYLARTQSNAGGTAGNRELQFYQGGPTTMAEQAKNWLPGPCFRQQRVSKTLDQNNNSNFAWTGATKYHLNGRNSLVNPGVAMATHKDDEERFFPSSGVLIFGKTGAANKTTLENVLMTNEEEIRPTNPVATEEYGTVSSNLQAANTAAQTQVVNNQGALPGMVWQNRDVYLQGPIWAKIPHTDGNFHPSPLMGGFGLKHPPPQILIKNTPVPANPPEVFTPAKFASFITQYSTGQVSVEIEWELQKENSKRWNPEIQYTSNFDKQTGVDFAVDSQGVYSEPRPIGTRYLTRNL

SEQ ID NO: 480 - protein, 737 aa, Adeno-associated virus
MAADGYLPDWLEDNLSEGIREWWDLKPGAPKPKANQQKQDDGRGLVLPGYKYLGPFNGLDKGEPVNAADAAALEHDKAYDQQLKAGDNPYLRYNHADAEFQERLQEDTSFGGNLGRAVFQAKKRVLEPLGLVEEAAKTAPGKKRPVEPSPQRSPDSSTGIGKKGQQPARKRLNFGQTGDSESVPDPQPIGEPPAGPSGLGSGTMAAGGGAPMADNNEGADGVGNASGNWHCDSTWLGDRVITTSTRTWALPTYNNHLYKQISSQSAGSTNDNVYFGYSTPWGYFDFNRFHCHFSPRDWQRLINNNWGFRPKKLNFKLFNIQVKEVTTNDGVTTIANNLTSTVQVFSDSEYQLPYVLGSAHQGCLPPFPADVFMIPQYGYLTLNNGSQSVGRSSFYCLEYFPSQMLRTGNNFTFSYTFEDVPFHSSYAHSQSLDRLMNPLIDQYLYYLARTQSNAGGTAGNRELQFYQGGPTTMAEQAKNWLPGPCFRQQRVSKTLDQNNNSNFAWTGATKYHLNGRNSLVNPGVAMATHKDDEERFFPSSGVLIFGKTGAANKTTLENVLMTNEEEIRPTNPVATEEYGTVSSNLQAANTAAQTQVVNNQGALPGMVWQNRDVYLQGPIWAKIPHTDGNFHPSPLMGGFGLKHPPPQILIKNTPVPANPPEVFTPAKFASFITQYSTGQVSVEIEWELQKENSKRWNPEIQYTSNFDKQTGVDFAVDSQGVYSEPRPIGTRYLTRNL

SEQ ID NO: 481 - protein, 737 aa, Adeno-associated virus
MAADGYLPDWLEDNLSEGIREWWDLKPGAPKPKANQQKQDDGRGLVLPGYKYLGPFNGLDKGEPVNAADAAALEHDKAYDQQLKAGDNPYLRYNHADAEFQERLQEDTSFGGNLGRAVFQAKKRVLEPLGLVEEAAKTAPGKKRPVEPSPQRSPDSSTGIGKKGQQPARKRLNFGQTGDSESVPDPQPIGEPPAGPSGLGSGTMAAGGGAPMADNNKGADGVGNASGNWHCDSTWLGDRVITTSTRTWALPTYNNHLYKQISSQSAGSTNDNVYFGYSTPWGYFDFNRFHCHFSPRDWQRLINNNWGFRPKKLNFKLFNIQVKEVTTNDGVTTIANNLTSTVQVFSDSEYQLPYVLGSAHQGCLPPFPADVFMIPQYGYLTLNNGSQSVGRSSFYCLEYFPSQMLRTGNNFTFSYTFEDVPFHSSYAHSQSLDRLMNPLIDQYLYYLARTQSNAGGTAGNRELQFYQGGPTTMAEQAKNWLPGPCFRQQRVSKTLDQNNNSNFAWTGATKYHLNGRNSLVNPGVAMATHKDDEERFFPSSGVLIFGKTGAANKTTLENVLMTNEEEIRPTNPVATEEYGTVSSNLQAANTAAQTQVVNNQGALPGMVWQNRDVYLQGPIWAKIPHTDGNFHPSPLMGGFGLKHPPPQILIKNTPVPANPPEVFTPAKFASFITQYSTGQVSVEIEWELQKENSKRWNPEIQYTSNFDKQTGVDFAVDSQGVYSEPRPIGTRYLTRNL

SEQ ID NO: 482 - DNA, 2214 bp, Adeno-associated virus
  source 1..2214: mol_type = unassigned DNA
atggctgctgacggttatcttccagattggctcgaggacaacctctctgagggcattcgcgagtggtgggacctgaaacctggagcccccaagcccaaggccaaccagcagaagcaggacgacggccggggtctggtgcttcctggctacaagtacctcggacccttcaacggactcgacaagggggagcccgtcaacgcggcggacgcagcggccctcgagcacgacaaggcctacgaccagcagctcaaagcgggtgacaatccgtacctgcggtataaccacgccgacgccgagtttcaggagcgtctgcaagaagatacgtcttttgggggcaacctcgggcgagcagtcttccaggccaagaagcgggttctcgaacctctcggtctggttgaggaagctgctaagacggctcctggaaagaagagaccggtagaaccgtcacctcagcgttcccccgactcctccacgggcatcggcaagaaaggccagcagcccgctagaaagagactgaactttgggcagactggcgactcagagtcagtccccgaccctcaaccaatcggagaaccaccagcaggcccctctggtctgggatctggtacaatggctgcaggcggtggcgcaccaatggctgacaataacaagggcgccgacggagtgggtaatgcctcaggaaattggcattgcgattccacatggctgggcgacagagtcatcaccaccagcacccgaacctgggctttgcccacctacaacaaccacctctacaagcaaatctccagtcagtcagcaggtagcaccaacgacaacgtctacttcggctacagcaccccctgggggtattttgacttcaacagattccactgtcacttctcaccacgtgactggcagcggctcatcaacagcaactggggattccggcccaagaagctcaacttcaagctgttcaacatccaggtcaaggaggtcacaacgaatgacggcgtcacgaccatcgccaataaccttaccagcacggttcaggtcttttcggactcggaataccagctgccctacgtcctcggctccgcacaccagggctgcctgcctccgttcccggcggacgtcttcatgattccccagtacggctacctgactctgaacaatggcagccaatcggtgggtcgttcctctttctactgcctggaatatttcccttctcaaatgctgagaacgggcaacaacttcaccttcagctacaccttcgaggacgttcccttccacagcagctacgcacacagccagagcctggaccggctgatgaatcctcttatcgaccagtacctgtattacctggccagaacacagagcaacgcaggaggcacagctggcaatcgggaactgcagttttatcagggcgggcctaccaccatggccgaacaagccaaaaactggctgcctggaccttgcttccggcaacaaagagtctccaagacgctggatcaaaacaacaacagcaactttgcttggactggtgccaccaaataccatctaaatggaagaaattcattggttaatcccggtgtcgccatggcaacccacaaggacgacgaggaacgcttcttcccttcgagcggagtcctgatttttggaaaaactggagcagctaataagactacactggaaaatgtgttaatgacaaatgaagaggaaattcgtcctaccaacccggtagccaccgaggaatacgggactgttagcagcaacctgcaggcggctaacactgcagcccagacacaagttgtcaacaaccagggagccttacctggtatggtctggcagaaccgggacgtgtacctgcagggtcccatctgggccaagattcctcacacggacggcaactttcacccgtctccgctgatgggcggctttggactgaagcatccgcctcctcagatcctgatcaaaaacactcctgttcctgctaatcccccggaggtgtttacgcctgccaagtttgcttctttcatcacacagtacagcaccggccaggtcagcgtggagatcgagtgggagctgcagaaggagaacagcaagcgctggaacccagagattcagtatacctccaattttgacaaacagactggtgtggactttgccgttgacagccagggtgtttattctgagcctcgccccattggtactcgttacctcacccgtaatctgtaa

SEQ ID NO: 483 - DNA, 2217 bp, Adeno-associated virus
  source 1..2217: mol_type = unassigned DNA
atggctgccgatggttatcttccagattggctcgaggacaacctctctgagggcattcgcgagtggtgggacctgaaacctggagccccgaaacccaaagccaaccagcaaaagcaggacgacggccggggtctggtgcttcctggctacaagtacctcggacccttcaacggactcgacaagggggagcccgtcaacgcggcggacgcagcggccctcgagcacgacaaggcctacgaccagcagctcaaagcgggtgacaatccgcacctgcggtataatcacgccgacgccgagtttcaggagcgtctgcaagaagatacgtcttttgggggcaacctcgggcgagcagtcttccaggccaagaagcgggttctcgaacctctcggtctggttgaggaaggcgctaagacggctcctggaaagaagagaccggtagagccgtcaccacagcgttcccccgactcctccacgggcatcggcaagaaaggccagcagcccgccagaaagagactcaatttcggtcagactggcgactcagagtcagtccccgaccctcaacttatcggagaacctccagcagcgccctctagtgtgggatctggtacaatggctgcaggcggtggcgcaccaatggcagacaataacgaaggtgccgacggagtgggtagttcctcgggaaattggcattgcgattccacatggctgggcgacagagtcatcaccaccagcacccgaacctgggccctgcccacctacaacaaccacctctacaagcaaatctccaacgggacctcgggaggcagcaccaacgacaacacctactttggctacagcaccccctgggggtattttgactttaacagattccactgccacttctcaccacgtgactggcagcgactcatcaacaacaactggggattccggcccaagagactcagcttcaagctcttcaacatccaggtcaaagaggtcacgcagaatgaaggcaccaagaccatcgccaataacctcaccagcaccatccaggtgtttacggactcggagtaccagctgccgtacgtcctcggctctgcccaccagggctgcctgcctccgttcccggcggacgtcttcatgattcctcagtacggcaacctgactctcaacaacggtagtcaggccgtgggacgttcctccttctactgcctggagtacttcccctctcagatgctgagaacgggcaacaacttttccttcagctacactttcgaggacgtgcctttccacagcagctacgcgcacagccagagtttggacaggctgatgaatcctctcatcgaccagtacctgtactacctgtcaagaacccagtctacgggaggcacagcgggaacccagcagttgctgttttctcaggccgggcctagcaacatgtcggctcaggccagaaactggctgcctggaccctgctacagacagcagcgcgtctccacgacactgtcgcaaaacaacaacagcaactttgcctggactggtgccaccaagtatcatctgaacggcagagactctctggtgaatccgggcgtcgccatggcaaccaacaaggacgacgaggaccgcttcttcccatccagcggcatcctcatgtttggcaagcagggagctggaaaagacaacatgggctatagcaacgtgatgctaaccagcgaggaagaaatcaagaccaccaaccccgtggccacagaacagtatggcgtggtggctgataacctacagcagcaaaacaccgctcctattgtgggggccgtcaacagccagggagccttacctggcatggtctggcagaaccgggacgtgtacctgcagggtcctatttgggccaagattcctcacacagatggcaactttcacccgtctcctttaatgggcggctttggacttaaacatccgcctcctcagatcctcatcaaaaacactcctgttcctgcggatcctccaacagcgttcaaccaggccaagctgaattctttcatcacgcagtacggcaccggacaagtcagcgtggagatcgagtgggagctgcagaaggagaacagcaagcgctggaacccagagattcagtatacttccaactactacaaatctacaaatgtggactttgctgttaatactgagggtgtttactctgagcctcgccccattggcactcgttacctcacccgtaatctgtaa

SEQ ID NO: 484 - protein, 738 aa, Adeno-associated virus
MAADGYLPDWLEDNLSEGIREWWDLKPGAPKPKANQQKQDDGRGLVLPGYKYLGPFNGLDKGEPVNAADAAALEHDKAYDQQLKAGDNPHLRYNHADAEFQERLQEDTSFGGNLGRAVFQAKKRVLEPLGLVEEGAKTAPGKKRPVEPSPQRSPDSSTGIGKKGQQPARKRLNFGQTGDSESVPDPQLIGEPPAAPSSVGSGTMAAGGGAPMADNNEGADGVGSSSGNWHCDSTWLGDRVITTSTRTWALPTYNNHLYKQISNGTSGGSTNDNTYFGYSTPWGYFDFNRFHCHFSPRDWQRLINNNWGFRPKRLSFKLFNIQVKEVTQNEGTKTIANNLTSTIQVFTDSEYQLPYVLGSAHQGCLPPFPADVFMIPQYGNLTLNNGSQAVGRSSFYCLEYFPSQMLRTGNNFSFSYTFEDVPFHSSYAHSQSLDRLMNPLIDQYLYYLSRTQSTGGTAGTQQLLFSQAGPSNMSAQARNWLPGPCYRQQRVSTTLSQNNNSNFAWTGATKYHLNGRDSLVNPGVAMATNKDDEDRFFPSSGILMFGKQGAGKDNMGYSNVMLTSEEEIKTTNPVATEQYGVVADNLQQQNTAPIVGAVNSQGALPGMVWQNRDVYLQGPIWAKIPHTDGNFHPSPLMGGFGLKHPPPQILIKNTPVPADPPTAFNQAKLNSFITQYGTGQVSVEIEWELQKENSKRWNPEIQYTSNYYKSTNVDFAVNTEGVYSEPRPIGTRYLTRNL

SEQ ID NO: 485 - DNA, 2217 bp, Adeno-associated virus
  source 1..2217: mol_type = unassigned DNA
atggctgccgatggttatcttccagattggctcgaggacaacctctctgagggcattcgcgagtggtgggacctgaaacctggagccccgaaacccaaagccaaccagcaaaagcaggacgacggccggggtctggtgcttcctggctacaagtacctcggacccttcaacggactcgacaagggggagcccgtcaacgcggcggacgcagcggccctcgagcacgacaaggcctacgaccagcagctcaaagcgggtgacaatccgtacctgcggtataatcacgccgacgccgagtttcaggagcgtctgcaagaagatacgtcttttgggggcaacctcgggcgagcagtcttccaggccaagaagcgggttctcgaacctctcggtctggttgaggaaggcgctaagacggctcctggaaagaagagaccggtagagccgtcaccacagcgttcccccgactcctccacgggcatcggcaagaaaggccagcagcccgccggaaagagactcaatttcggtcagactggcgactcagagtcagtccccgaccctcaacctatcggagaacctccagcagcgccctctagtgtgggatctggtacaatggctgcaggcggtggcgcaccaatggcagacaataacgaaggtgccgacggagtgggtagttcctcgggaaattggcattgcgattccacatggctgggcgacagagtcatcaccaccagcacccgaacctgggccctgcccacctacaacaaccacctctacaagcaaatctccaacgggacctcgggaggcagcaccaacgacaacacctactttggctacagcaccccctgggggtattttgactttaacagattccactgccacttctcaccacgtgactggcagcgactcatcaacaacaactggggattccggcccaagagactcagcttcaagctcttcaacatccaggtcaaagaggtcacgcagaatgaaggcaccaagaccatcgccaataacctcaccagcaccatccaggtgtttacggactcggaataccagctgccgtacgtcctcggctctgcccaccagggctgcctgcctccgttcccggcggacgtcttcatgattcctcagtacggctacctgactctcaacaacggtagtcaggccgtgggacgttcctccttctactgcctggagtacttcccctctcagatgctgagaacgggcaacaacttttccttcagctacactttcgaggacgtgcctttccacagcagctacgcgcacagccagagtttggacaggctgatgaatcctctcgtcgaccagtacctgtactacctgtcaagaacccagtctacgggaggcacagcgggaacccagcagttgctgttttctcaggccgggcctagcaacatgtcggctcaggccagaaactggctgcctggaccctgctacagacagcagcgcgtctccacgacactgtcgcaaaacaacaacagcaactttgcctggactggtgccaccaagtatcatctgaacggcagagactctctggtgaatccgggcgtcgccatggcaaccaacaaggacgacgaggaccgcttcttcccatccagcggcatcctcatgtttggcaagcagggagctggaaaagacaacgtggactatagcaacgtgatgctaaccagcgaggaagaaatcaagaccaccaaccccgtggccacagaacagtatggcgtggtggctgataacctacagcagcaaaacaccgctcctattgtgggggccgtcaacagccagggagccttacctggcatggtctggcagaaccgggacgtgtacctgcagggtcctatttgggccaagattcctcacacagatggcaactttcacccgtctcctttaatgggcggctttggacttaaacatccgcctcctcagatcctcatcaaaaacactcctgttcctgcggatcctccaacagcgttcaaccaggccaagctgaattctttcatcacgcagtacagcaccggacaagtcagcgtggagatcgagtgggagctgcagaaggagaacagcaagcgctggagcccagagattcagtatacttccaactactacaaatctacaaatgtggactttgctgttaatactgagggtgtttactctgagcctcgccccattggcactcgttacctcacccgtaatctgtaa

SEQ ID NO: 486 - protein, 738 aa, Adeno-associated virus
MAADGYLPDWLEDNLSEGIREWWDLKPGAPKPKANQQKQDDGRGLVLPGYKYLGPFNGLDKGEPVNAADAAALEHDKAYDQQLKAGDNPYLRYNHADAEFQERLQEDTSFGGNLGRAVFQAKKRVLEPLGLVEEGAKTAPGKKRPVEPSPQRSPDSSTGIGKKGQQPAGKRLNFGQTGDSESVPDPQPIGEPPAAPSSVGSGTMAAGGGAPMADNNEGADGVGSSSGNWHCDSTWLGDRVITTSTRTWALPTYNNHLYKQISNGTSGGSTNDNTYFGYSTPWGYFDFNRFHCHFSPRDWQRLINNNWGFRPKRLSFKLFNIQVKEVTQNEGTKTIANNLTSTIQVFTDSEYQLPYVLGSAHQGCLPPFPADVFMIPQYGYLTLNNGSQAVGRSSFYCLEYFPSQMLRTGNNFSFSYTFEDVPFHSSYAHSQSLDRLMNPLVDQYLYYLSRTQSTGGTAGTQQLLFSQAGPSNMSAQARNWLPGPCYRQQRVSTTLSQNNNSNFAWTGATKYHLNGRDSLVNPGVAMATNKDDEDRFFPSSGILMFGKQGAGKDNVDYSNVMLTSEEEIKTTNPVATEQYGVVADNLQQQNTAPIVGAVNSQGALPGMVWQNRDVYLQGPIWAKIPHTDGNFHPSPLMGGFGLKHPPPQILIKNTPVPADPPTAFNQAKLNSFITQYSTGQVSVEIEWELQKENSKRWSPEIQYTSNYYKSTNVDFAVNTEGVYSEPRPIGTRYLTRNL

SEQ ID NO: 487 - DNA, 2217 bp, Adeno-associated virus
  source 1..2217: mol_type = unassigned DNA
atggttgccgatggttatcttccagattggctcgaggacaacctctctgagggcattcgcgagtggtgggacctgaaacctggagccccgaaacccaaagccaaccagcaaaagcagggcgacggccggggtctggtgcttcctggctacaagtacctcggacccttcaacggactcgacaagggggagcccgtcaacgcggcggacgcagcggccctcgagcacgacaaggcctacgaccagcagcttaaagcgggtgacaatccgtacctgcggtataatcacgccgacgccgagcttcaggagcgtctgcaagaagatacgtcttttgggggcaacctcgggcgagcagtcttccaggccaagaagcgggttctcgaacctctcggtctggttgaggaaggcgctaagacggctcctggaaagaagagaccggtagagccgtcaccacagcgttcccccgactcctccacgggcatcggcaagaaaggccagcagcccgccagaaagagactcaatttcggtcagactggcgactcagagtcagtccccgaccctcaacctatcggagaacctccagcagcgccctctagtgtgggatctggtacaatggctgcaggcggtggcgcgccaatggcagacaataacgaaggtgccgacggagtgggtagttcctcgggaaattggcattgcgattccacatggctgggcgacagagtcatcaccaccagcacccgaacctgggccctgcccacctacaacaaccacctctacaagcaaatctccaacgggacctcgggaggcagcaccaacgacaacacctactttggctacagcaccccctgggggtattttgactttaacagattccactgccacttctcaccacgtgactggcagcgactcatcaacaacaactggggattccggcccaagagactcagcttcaagctcttcaacatccaggtcaaagaggtcacgcagaatgaaggcaccaagaccatcgccaataacctcaccagcaccatccaggtgtttacggactcggaataccagctgccgtacgtcctcggctctgcccaccagggctgccagcctccgttcccggcggacgtcttcatgattcctcagtacggctacctgactctcaacaacggtagtcaggccgtgggacgttcctccttctactgcctggagtacttcccctctcagatgctgagaacgggcaacaacttttccttcagctacactttcgaggacgtgcctttccacagcagctacgcgcacagccagagtttggacaggctgatgaatcctctcatcgaccagtacctgtactacctgtcaagaacccagtctacgggaggcacagcgggaacccagcagttgctgttttctcaggccgggcctagcaacatgtcggctcaggccagaaactggctgcctggaccctgctacagacagcagcgcgtctccacgacactgtcgcaaaacaacaacagcaactttgcctggactggtgccaccaagtatcatctgaacggcagagactctctggtgaatccgggcgtcgccatggcaaccaacaaggacgacgaggaccgcttcttcccatccagcggcatcctcatgtttggcaagcagggagctggaaaagacaacgtggactatagcaacgtgatgctaaccagcgaggaagaaatcaagaccaccaaccccgtggccacagaacagtatggcgtggtggctgataacctacagcagcaaaacaccgctcctattgtgggggccgtcaacagccagggagccttacctggcatggtctggcagaaccgggacgtgtacctgcagggtcctatttgggccaagattcctcacacagatggcaactttcacccgtctcctttaatgggcggctttggacttaaacatccgcctcctcagatcctcatcaaaaacactcctgttcctgcggatcctccaacagcgttcaaccaggccaagctgaattctttcatcacgcagtacagcaccggacaagtcagcgtggagatcgagtgggagccgcagaaggagaacagcaagcgctggaacccagagattcagtatacttccaactactacaaatctacaaatgtggactttgctgttaatactgagggtgtttactctgagcctcgccccattggcactcgttacctcacccgtaatctgtaa

SEQ ID NO: 488 - protein, 738 aa, Adeno-associated virus
MVADGYLPDWLEDNLSEGIREWWDLKPGAPKPKANQQKQGDGRGLVLPGYKYLGPFNGLDKGEPVNAADAAALEHDKAYDQQLKAGDNPYLRYNHADAELQERLQEDTSFGGNLGRAVFQAKKRVLEPLGLVEEGAKTAPGKKRPVEPSPQRSPDSSTGIGKKGQQPARKRLNFGQTGDSESVPDPQPIGEPPAAPSSVGSGTMAAGGGAPMADNNEGADGVGSSSGNWHCDSTWLGDRVITTSTRTWALPTYNNHLYKQISNGTSGGSTNDNTYFGYSTPWGYFDFNRFHCHFSPRDWQRLINNNWGFRPKRLSFKLFNIQVKEVTQNEGTKTIANNLTSTIQVFTDSEYQLPYVLGSAHQGCQPPFPADVFMIPQYGYLTLNNGSQAVGRSSFYCLEYFPSQMLRTGNNFSFSYTFEDVPFHSSYAHSQSLDRLMNPLIDQYLYYLSRTQSTGGTAGTQQLLFSQAGPSNMSAQARNWLPGPCYRQQRVSTTLSQNNNSNFAWTGATKYHLNGRDSLVNPGVAMATNKDDEDRFFPSSGILMFGKQGAGKDNVDYSNVMLTSEEEIKTTNPVATEQYGVVADNLQQQNTAPIVGAVNSQGALPGMVWQNRDVYLQGPIWAKIPHTDGNFHPSPLMGGFGLKHPPPQILIKNTPVPADPPTAFNQAKLNSFITQYSTGQVSVEIEWEPQKENSKRWNPEIQYTSNYYKSTNVDFAVNTEGVYSEPRPIGTRYLTRNL

SEQ ID NO: 489 - DNA, 2217 bp, Adeno-associated virus
  source 1..2217: mol_type = unassigned DNA
atggctgccgatggttatcttccagattggctcgaggacaacctctctgagggcattcgcgagtggtgggacctgaaacctggagccccgaaacccaaagccaaccagcaaaagcaggacgacggccggggtctggtgcttcctggctacaagtacctcggacccttcaacggactcgacaagggggagcccgtcaacgcggcggacgcagcggccctcgagcacgacaaggcctacgaccagcagctcaaagcgggtgacaatccgtacctgcggtataatcacgccgacgccgagtttcaggagcgtctgcaagaagatacgtcttttgggggcaacctcgggcgagcagtcttccaggccaagaagcgggttctcgaacctctcggtctggttgaggaaggcgctaagacggctcctggaaagaagagaccggtagagccgtcaccacagcgttcccccgactcctccacgggcatcggcaagaaaggccagcagcccgccagaaagagactcaatttcggtcagactggcgactcagagtcagtccccgaccctcaacctatcggagaacctccagcagcgccctctagtgtgggatctggtacaatggctgcaggcggtggcgcaccaatggcagacaataacgaaggtgccgacggagtgggtagttcctcgggaaattggcattgcgattccacatggctgggcgacagagtcatcaccaccagcacccgaacctgggccctgcccacctacaacaaccacctctacaagcaaatctccaacgggacctcgggaggcagcaccaacgacaacacctactttggctacagcaccccctgggggtattttgactttaacagattccactgccacttctcaccacgtgactggcagcgactcatcaacaacaactggggattccggcccaagagactcagcttcaagctcttcaacatccaggtcaaagaggtcacgcagaatgaaggcaccaagaccatcgccaatagcctcaccagcaccatccaggtgtttacggactcggaataccagctgccgtacgtcctcggctctgcccaccagggctgcctgcctccgttcccggcggacgtcttcatgattcctcagtacggctacctgactcccaacaacggtagtcaggccgtgggacgttcctccttctactgcctggagtacttcccctctcagatgctgagaacgggcaacaacttttccttcagctacactttcgaggacgtgcctttccacagcagctacgcgcacagccagagtttggacaggctgatgaatcctctcatcgaccagtacctgtactacctgtcaagaacccagtctacgggaggcacagcgggaacccagcagttgctgtcttctcaggccgggcctagcaacatgtcggctcaggccagaaactggctgcctggaccctgctacagacagcagcgcgtctccacgacactgtcgcaaaacaacaacagcaactttgcctggactggtgccaccaagtatcatctgaacggcagagactctctggtgaatccgggcgtcgccatggcaaccaacaaggacgacgaggaccgcttcttcccatccagcggcatcctcatgtttggcaagcagggagctggaaaagacaacgtggactatagcaacgtgatgctaaccagcgaggaagaaatcaagaccaccaaccccgtggccacagaacagtatggcgtggtggctgataacctacagcagcaaaacaccgctcctattgtgggggccgtcaacagccagggagccttacctggcatggtctggcagaaccgggacgtgtacttgcagggtcctatttgggccaagattcctcacacagatggcaactttcacccgtctcctttaatgggcggctttggacttaaacatccgcctcctcagatcctcatcaaaaacactcctgttcctgcggatcctccaacagcgttcaaccaggccaagctgaattctttcatcacgcagtacagcaccggacaagtcagcgtggagatcgagtgggagctgcagaaggagaacagcaagcgctggaacccagagattcagtatacttccaactactacaaatctacaaatgtggactttgctgttaatactgagggtgtttactctgagcctcgccccattggcactcgttacctcacccgtaatctgtaa

SEQ ID NO: 490 - protein, 738 aa, Adeno-associated virus
MAADGYLPDWLEDNLSEGIREWWDLKPGAPKPKANQQKQDDGRGLVLPGYKYLGPFNGLDKGEPVNAADAAALEHDKAYDQQLKAGDNPYLRYNHADAEFQERLQEDTSFGGNLGRAVFQAKKRVLEPLGLVEEGAKTAPGKKRPVEPSPQRSPDSSTGIGKKGQQPARKRLNFGQTGDSESVPDPQPIGEPPAAPSSVGSGTMAAGGGAPMADNNEGADGVGSSSGNWHCDSTWLGDRVITTSTRTWALPTYNNHLYKQISNGTSGGSTNDNTYFGYSTPWGYFDFNRFHCHFSPRDWQRLINNNWGFRPKRLSFKLFNIQVKEVTQNEGTKTIANSLTSTIQVFTDSEYQLPYVLGSAHQGCLPPFPADVFMIPQYGYLTPNNGSQAVGRSSFYCLEYFPSQMLRTGNNFSFSYTFEDVPFHSSYAHSQSLDRLMNPLIDQYLYYLSRTQSTGGTAGTQQLLSSQAGPSNMSAQARNWLPGPCYRQQRVSTTLSQNNNSNFAWTGATKYHLNGRDSLVNPGVAMATNKDDEDRFFPSSGILMFGKQGAGKDNVDYSNVMLTSEEEIKTTNPVATEQYGVVADNLQQQNTAPIVGAVNSQGALPGMVWQNRDVYLQGPIWAKIPHTDGNFHPSPLMGGFGLKHPPPQILIKNTPVPADPPTAFNQAKLNSFITQYSTGQVSVEIEWELQKENSKRWNPEIQYTSNYYKSTNVDFAVNTEGVYSEPRPIGTRYLTRNL

SEQ ID NO: 491 - protein, 738 aa, Adeno-associated virus
MAADGYLPDWLEDNLSEGIREWWDLKPGAPKPKANQQKQDDGRGLVLPGYKYLGPFNGLDKGEPVNAADAAALEHDKAYDQQLKAGDNPYLRYNHADAEFQERLQEDTSFGGNLGRAVFQAKKRVLEPLGLVEEGAKTAPGKKRPVEPSPQRSPDSSTGIGKKGQQPARKRLNFGQTGDSESVPDPQPIGEPPAAPSSVGSGTMAAGGGAPMADNNEGADGVGSSSGNWHCDSTWLGDRVITTSTRTWALPTYNNHLYKQISNGTSGGSTNDNTYFGYSTPWGYFDFNRFHCHFSPRDWQRLINNNWGFRPKRLSFKLFNIQVKEVTQNEGTKTIANNLTSTIQVFTDSEYQLPYVLGSAHQGCLPPFPADVFMIPQYGYLTLNNGSQAVGRSSFYCLEYFPSQMLRTGNNFSFSYTFEDVPFHSSYVHSQSLDRLMNPLIDQYLYYLSRTQSTGGTAGTQQLLFSQAGPSNMSAQARNWLPGPCYRQQRVSTTLSQNNNSNFAWTGATKYHLNGRDSLVNSGVAMATNKDDEDRFFPSSGILMFGKQGAGKDNVDYSNVMLTSEEEIKTTNPVATEQYGVVADNLQQQNTAPIVGAVNSQGALPGMVWQNRDVYLQGPIWAKIPHTDGNFHPSPLMGGFGLKHPPPQILIKNTPVPADPPTAFNQAKLNSFITQYSTGQVSVEIEWELQKENSKRWNPEIQYTSNYYKSTNVDFAVNTEGVYSEPRPIGTRYPTRNL

SEQ ID NO: 492 - DNA, 2217 bp, Adeno-associated virus
  source 1..2217: mol_type = unassigned DNA
atggctgccgatggttatcttccagattggctcgaggacaacctctctgagggcattcgcgagtggtgggacctgaaacctggagccccgaaacccaaagccaaccagcaaaagcaggacgacggccggggtctggtgcttcctggctacaagtacctcggacccttcaacggactcgacaagggggagcccgtcaacgcggcggacgcagcggccctcgagcacgacaaggcctacgaccagcagctcaaagcgggtgacaatccgtacctgcggtataatcacgccgacgccgagtttcaggagcgtctgcaagaagatacgtcttttgggggcaacctcgggcgagcagtcttccaggccaagaagcgggttctcgaacctctcggtctggttgaggaaggcgctaagacggctcctggaaagaagagaccggtagagccgtcaccacagcgttcccccgactcctccacgggcatcggcaagaaaggccagcagcccgccagaaagagactcaatttcggtcagactggcgactcagagtcagtccccgaccctcaacctatcggagaacctccagcagcgccctctagtgtgggatctggtacaatggctgcaggcggtggcgcaccaatggcagacaataacgaaggtgccgacggagtgggtagttcctcgggaaattggcattgcgattccacatggctgggcgacagagtcatcaccaccagcacccgaacctgggccctgcccacctacaacaaccacctctacaagcaaatctccaacgggacctcgggaggcagcaccaacgacaacacctactttggctacagcaccccctgggggtattttgactttaacagattccactgccacttctcaccacgtgactggcagcgactcatcaacaacaactggggattccggcccaagagactcagcttcaagctcttcaacatccaggtcaaagaggtcacgcagaatgaaggcaccaagaccatcgccaataacctcaccagcaccatccaggtgtttacggactcggaataccagctgccgtacgtcctcggctctgcccaccagggctgcctgcctccgttcccggcggacgtcttcatgattcctcagtacggctacctgactctcaacaacggtagtcaggccgtgggacgttcctccttctactgcctggagtacttcccctctcagatgctgagaacgggcaacaacttttccttcagctacactttcgaggacgtgcctttccacagcagctacgtgcacagccagagtttggacaggctgatgaatcctctcatcgaccagtacctgtactacctgtcaagaacccagtctacgggaggcacagcgggaacccagcagttgctgttttctcaggccgggcctagcaacatgtcggctcaggccagaaactggctgcctggaccctgctacagacagcagcgcgtctccacgacactgtcgcaaaacaacaacagcaactttgcctggactggtgccaccaagtatcatctgaacggcagagactctctggtgaattcgggcgtcgccatggcaaccaacaaggacgacgaggaccgcttcttcccatccagcggcatcctcatgtttggcaagcagggagctggaaaagacaacgtggactatagcaacgtgatgctaaccagcgaggaagaaatcaagaccaccaaccccgtggccacagaacagtatggcgtggtggctgataacctacagcagcaaaacaccgctcctattgtgggggccgtcaacagccagggagccttacctggcatggtctggcagaaccgggacgtgtacctgcagggtcctatttgggccaagattcctcacacagatggcaactttcacccgtctcctttaatgggcggctttggacttaaacatccgcctcctcagatcctcatcaaaaacactcctgttcctgcggatcctccaacagcgttcaaccaggccaagctgaattctttcatcacgcagtacagcaccggacaagtcagcgtggagatcgagtgggagctgcagaaggagaacagcaagcgctggaacccagagattcagtatacttccaactactacaaatctacaaatgtggactttgctgttaatactgagggtgtttactctgagcctcgccccattggcactcgttaccccacccgtaatctgtaa

SEQ ID NO: 493 - protein, 734 aa, Adeno-associated virus; identical to SEQ ID NO: 318

SEQ ID NO: 494 - DNA, 2214 bp, Adeno-associated virus
  source 1..2214: mol_type = unassigned DNA
atggctgctgacggttatcttccagattggctcgaggacaacctctctgagggcattcgcgagtggtgggacctgaaacctggagccccgaaacccaaagccaaccagcagaagcaggacgacggccggggtctggtgcttcctggctacaagtacctcggacccttcaacggactcgacaagggggagcccgtcaacgcggcggacgcagcggccctcgagcacgacaaggcctacgaccagcagctcaaagcgggtgacaatccgtacctgcggtataaccacgccgacgccgagtttcaggagcgtctgcaagaagatacgtcttttgggggcaacctcgggcgagcagtcttccaggccaagaagcgggttctcgaacctctcggtctggttgaggaagctgctaagacggctcctggaaagaagagaccggtagaaccgtcacctcagcgttcccccgactcctccacgggcatcggcaagaaaggccagcagcccgctagaaagagactgaactttgggcagactggcgactcagagtcagtccccgaccctcaacctctcggagaaccaccagcaggcccctctggtctgggatctggtacaatggctgcaggcggtggcgctccaatggcagacaataacgaaggcgccgacggagtgggtaatgcctcaggaaattggcattgcgattccacatggctgggcgacagagtcatcaccaccagcacccgaacctgggctttgcccacctacaacaaccacctctacaagcaaatctccagtcagtcagcaggtagcaccaacgacaacgtctacttcggctacagcaccccctgggggtattttgacttcaacagattccactgtcacttctcaccacgtgactggcagcgactcatcaacaacaactggggattccggcccaagaagctcaacttcaagctcttcaacatccaagtcaaggaggtcacgacgaatgacggcgtcacgaccatcgctaataaccttaccagcacggttcaggtcttttcggactcggagtaccagctgccgtacgtcctcggctctgcccaccagggctgcctgcctccgttcccggcggacgtcttcatgattcctcagtacggctacctgactctgaacaatggcagccaatcggtgggacgttcatccttctactgcctggaatacttcccttctcaggtgctgagaacgggtaacaacttcaccttcagttacaccttcgaggacgtgcctttccacagcagctacgcgcacagccagagcctagaccggctgatgaatcccctcatcgaccagtacctgtattacctggctagaacacagagtaacccaggaggcacatctggcaatcgggaactgcagttttaccagggcgggccttccaccatggccgaacaagccaagaactggttacctggaccttgcttccggcaacaaagagtttccaaaacactggatcaaaacaacaacagcaactttgcttggactggtgccaccaaatatcacctgaacggcagaaactcattggtgaatcctggtgtcgccatggcaactcacaaggacgacgaggaccgctttttcccatccagcggagtcctgatttttggaaaaactggagcaaccaacaagactacattggaaaacgtgttaatgacaaatgaagaagaaattcgtcctactaatcctgtggccacagaagaatacgggatagtcagcagcaatttacaagcggccaatactgcagcccagacacaagttgtcaacaaccagggagccttacctggcatggtctggcagaaccgggacgtgtacctgcagggtcccatctgggccaaaattcctcacacagacggcaactttcacccgtctccgctgatgggcggctttggactgaagcatccgcctcctcagatcctgatcaaaaacactcctgttcctgctaatcccccggaggtgtttacgcctgccaagtttgcttctttcatcacacagtacagcaccggccaggtcagcgtggagatcgagtgggagctgcagaaggagaacagcaagcgctggaacccagagattcagtatacctccaattttgacaaacagactggtgtggactttgccgttgacagccagggtgtttattctgagcctcgccccattggtactcgttacctcacccgtaatctgtaa

SEQ ID NO: 495 - protein, 737 aa, Adeno-associated virus
MAADGYLPDWLEDNLSEGIREWWDLKPGAPKPKANQQKQDDGRGLVLPGYKYLGPFNGLDKGEPVNAADAAALEHDKAYDQQLKAGDNPYLRYNHADAEFQERLQEDTSFGGNLGRAVFQAKKRVLEPLGLVEEAAKTAPGKKRPVEPSPQRSPDSSTGIGKKGQQPARKRLNFGQTGDSESVPDPQPLGEPPAGPSGLGSGTMAAGGGAPMADNNEGADGVGNASGNWHCDSTWLGDRVITTSTRTWALPTYNNHLYKQISSQSAGSTNDNVYFGYSTPWGYFDFNRFHCHFSPRDWQRLINNNWGFRPKKLNFKLFNIQVKEVTTNDGVTTIANNLTSTVQVFSDSEYQLPYVLGSAHQGCLPPFPADVFMIPQYGYLTLNNGSQSVGRSSFYCLEYFPSQVLRTGNNFTFSYTFEDVPFHSSYAHSQSLDRLMNPLIDQYLYYLARTQSNPGGTSGNRELQFYQGGPSTMAEQAKNWLPGPCFRQQRVSKTLDQNNNSNFAWTGATKYHLNGRNSLVNPGVAMATHKDDEDRFFPSSGVLIFGKTGATNKTTLENVLMTNEEEIRPTNPVATEEYGIVSSNLQAANTAAQTQVVNNQGALPGMVWQNRDVYLQGPIWAKIPHTDGNFHPSPLMGGFGLKHPPPQILIKNTPVPANPPEVFTPAKFASFITQYSTGQVSVEIEWELQKENSKRWNPEIQYTSNFDKQTGVDFAVDSQGVYSEPRPIGTRYLTRNL

SEQ ID NO: 496 - DNA, 2214 bp, Adeno-associated virus
  source 1..2214: mol_type = unassigned DNA
atggctgccgatggttatcttccagattggctcgaggacaacctctctgagggcattcgcgagtggtgggacctgaaacctggagccccgaaacccaaagccaaccagcaaaagcaggacgacggccggggtctggtgcttcctggctacaagtacctcggacccttcaacggactcgacaagggggagcccgtcaacgcggcggacgcagcggccctcgagcacgacaaggcctacgaccagcagctcaaagcgggtgacaatccgtacctgcggtataatcacgccgacgccgagtttcaggagcgtctgcaagaagatacgtcttttgggggcaacctcgggcgagcagtcttccaggccaagaagcgggttctcgaacctctcggtctggttgaggaaggcgctaagacggctcctggaaagaagagaccggtagagccgtcaccacagcgttcccccgactcctccacgggcatcggcaagaaaggccagcagcccgccagaaagagactcaatttcggtcagactggcgactcagagtcagtccccgaccctcaacctatcggagaacctccagcagcgccctctagtgtgggatctggtacaatggctgcaggcggtggcgcaccaatggcagacaataacgaaggtgccgacggagtgggtagttcctcgggaaattggcattgcgattccacacggctgggcgacagagtcatcaccaccagcacccggacctgggctttgcccacctacaacaaccacctctacaagcaaatctccagtcagtcagcaggtagcaccaacgacaacgtctacttcggctacagcaccccctgggggtattttgacttcaacagattccactgtcacttctcaccacgtgactggcagcggctcatcaacaacaactggggattccggcccaagaagctcaacttcaagctgttcaacatccaggtcaaggaggtcacaacgaatgacggcgtcacgaccatcgccaataaccttaccagcacggttcaggtcttttcggactcggaataccagctgccctacgtcctcggctccgcacaccagggctgcctgcctccgttcccggcggacgtcttcatgattccccagtacggctacctgactctgaacaatggcagccaatcggtgggtcgttcctctttctactgcctggaatatttcccttctcaaatgctgagaacgggcaacaacttcaccttcagctacaccttcgaggacgttcccttccacagcagctacgcacacagccagagcctggaccggctgatgaatcctcttatcgaccagtacctgtattacctggccagaacacagagcaacgcaggaggcacagctggcaatcgggaactgcagttttatcagggcgggcctaccaccatggccgaacaagccaaaaactggctgcctggaccttgcttccggcaacgaagagtctccaagacgctggatcaaaacaacaacagcaactttgcttggactggtgccaccaaataccatctaaatggaagaaattcattggttaatcccggtgtcgccatggcaacccacaaggacgacgaggaacgcttcttcccttcgagcggagtcctgatttttggaaaaactggagcagctaataagactacactggaaaatgtgttaatgacaaatgaagaggaaattcgtcctaccaacccggtagccaccgaggaatacgggactgttagcagcaacctgcaggcggctaacactgcagcccagacacaagttgtcaacaaccagggagccttacctggtatggtctggcagaaccgggacgtgtacctgcagggtcccatctgggccaagattcctcacacggacggcaactttcacccgtctccgctgatgggcggctttggactgaagcatccgcctcctcagatcctgatcaaaaacactcctgttcctgctaatcccccggaggtgtttacgcctgccaagtttgcttctttcatcacacagtacagcaccggccaggtcagcgtggagatcgagtgggagctgcagaaggagaacagcaagcgctggaacccagagattcagtatacctccaattttgacaaacagactggtgtggactttgccgttgacagccagggtgtttattctgagcctcgccccattggtactcgttacctcacccgtaatctgtaa

SEQ ID NO: 497 - protein, 737 aa, Adeno-associated virus
MAADGYLPDWLEDNLSEGIREWWDLKPGAPKPKANQQKQDDGRGLVLPGYKYLGPFNGLDKGEPVNAADAAALEHDKAYDQQLKAGDNPYLRYNHADAEFQERLQEDTSFGGNLGRAVFQAKKRVLEPLGLVEEGAKTAPGKKRPVEPSPQRSPDSSTGIGKKGQQPARKRLNFGQTGDSESVPDPQPIGEPPAAPSSVGSGTMAAGGGAPMADNNEGADGVGSSSGNWHCDSTRLGDRVITTSTRTWALPTYNNHLYKQISSQSAGSTNDNVYFGYSTPWGYFDFNRFHCHFSPRDWQRLINNNWGFRPKKLNFKLFNIQVKEVTTNDGVTTIANNLTSTVQVFSDSEYQLPYVLGSAHQGCLPPFPADVFMIPQYGYLTLNNGSQSVGRSSFYCLEYFPSQMLRTGNNFTFSYTFEDVPFHSSYAHSQSLDRLMNPLIDQYLYYLARTQSNAGGTAGNRELQFYQGGPTTMAEQAKNWLPGPCFRQRRVSKTLDQNNNSNFAWTGATKYHLNGRNSLVNPGVAMATHKDDEERFFPSSGVLIFGKTGAANKTTLENVLMTNEEEIRPTNPVATEEYGTVSSNLQAANTAAQTQVVNNQGALPGMVWQNRDVYLQGPIWAKIPHTDGNFHPSPLMGGFGLKHPPPQILIKNTPVPANPPEVFTPAKFASFITQYSTGQVSVEIEWELQKENSKRWNPEIQYTSNFDKQTGVDFAVDSQGVYSEPRPIGTRYLTRNL

SEQ ID NO: 498 - DNA, 2208 bp, Adeno-associated virus
  source 1..2208: mol_type = unassigned DNA
atggctgccgatggttatcttccagattggctcgaggacactctctctgaaggaataagacagtggtggaagctcaaacctggcccaccaccaccaaagcccgcagagcggcataaggacgacagcaggggtcttgtgcttcctgggtacaagtacctcggacccttcaacggactcgacaagggggagccggtcaacgaggcagacgccgcggccctcgagcacgacaaggcctacgaccggcagctcgacagcggagacaacccgtacctcaagtacaaccacgccgacgcggagtttcaggagcgtcttaaagaagatacgtcttttgggggcaacctcggacgagcagtcttccaggcgaaaaagagggttcttgaacctctgggcctggttgaggaacctgttaagacggctccgggaaaaaagaggccggtagagcactctcctgcggagccagactcctcctcgggaaccggaaaagcgggccagcagcctgcaagaaaaagattgaattttggtcagactggagacgcagactccgtacctgacccccagcctctcggacagccaccagcagccccctctggtttgggatctactacaatggctacaggcagtggcgcaccaatggcagacaataacgagggtgccgatggagtgggtaattcttcaggaaattggcattgcgattcccaatggctgggcgacagagtcatcaccaccagcacccgaacctgggcccagcccacctacaacaaccacctctacaagcaaatctcaagccaatcaggagcctcaaacgacaaccactactttggctacagcaccccttgggggtattttgacttcaacagattccactgccacttttcaccacgtgactggcaaagactcatcaacaacaactggggattccgacccaagagactcaacttcaagctctttaacattcaagtcaaagaggtcacgcagaatgacggtacgacgacgattgccaataaccttaccagcacggttcaggtgtttactgactcggagtaccagctcccgtacgtcctcgggtcggcgcatcaaggatgcctcccgccgtttccagcggacgtcttcatggtcccacagtatggatacctcaccctgaacaacgggagtcaggcggtaggacgctcttccttttactgcctggagtactttccttctcagatgcttcgtactggaaacaactttcagttcagctacacctttgaagacgttcctttccacagcagctacgctcacagccagagtctggatcggctgatgaatcctctgatcgaccagtacctgtattatctgaacaaaacacaatcaaatagtggagctcttcagcagtctcggctactgtttagtcaagctggacccaccagcatgtctcttcaagctaaaaactggctacctggaccttgctacagacagcagcgtctgtcaaagcaggcaaacgacaacaacaacagcaactttccctggactgcggctacaaagtaccacctaaatggccgggactcgttggttaatccaggaccagctatggccagtcacaaagacgatgaagaaaagtttttccccatgcatggaaccctgatatttggtaaacaaggaacaaatgctaacgacgcggatttggacaatgtcatgattacagatgaagaagaaatccgcaccaccaatcccgtggctacggagcagtacggatatgtgtcaaataatttgcaaaactcaaatactggtccaactactggaactgtcaatcaccgaggagcgttacctggcatggtgtggcaggatcgagacgtgtacctgcagggacccatttgggccaagattcctcacaccgatggacactttcatccttctccactgatgggaggttttgggctcaaacacccgcctcctcagatcatgatcaaaaacactcccgttccagccaatcctcccacaaacttcagttctgccaagtttgcttctttcatcacacagtattccacggggcaggtcagcgtggagatcgagtgggagctgcagaaagagaacagcaaacgctggaatcccgaaattcagtacacttccaactacaacaaatctgttaatgtggactttactgtggacactaatggcgtgtattcagagcctcgccccattggcaccagatacctgactcgtaatctgtaa

SEQ ID NO: 499 - protein, 735 aa, Adeno-associated virus
MAADGYLPDWLEDTLSEGIRQWWKLKPGPPPPKPAERHKDDSRGLVLPGYKYLGPFNGLDKGEPVNEADAAALEHDKAYDRQLDSGDNPYLKYNHADAEFQERLKEDTSFGGNLGRAVFQAKKRVLEPLGLVEEPVKTAPGKKRPVEHSPAEPDSSSGTGKAGQQPARKRLNFGQTGDADSVPDPQPLGQPPAAPSGLGSTTMATGSGAPMADNNEGADGVGNSSGNWHCDSQWLGDRVITTSTRTWAQPTYNNHLYKQISSQSGASNDNHYFGYSTPWGYFDFNRFHCHFSPRDWQRLINNNWGFRPKRLNFKLFNIQVKEVTQNDGTTTIANNLTSTVQVFTDSEYQLPYVLGSAHQGCLPPFPADVFMVPQYGYLTLNNGSQAVGRSSFYCLEYFPSQMLRTGNNFQFSYTFEDVPFHSSYAHSQSLDRLMNPLIDQYLYYLNKTQSNSGALQQSRLLFSQAGPTSMSLQAKNWLPGPCYRQQRLSKQANDNNNSNFPWTAATKYHLNGRDSLVNPGPAMASHKDDEEKFFPMHGTLIFGKQGTNANDADLDNVMITDEEEIRTTNPVATEQYGYVSNNLQNSNTGPTTGTVNHRGALPGMVWQDRDVYLQGPIWAKIPHTDGHFHPSPLMGGFGLKHPPPQIMIKNTPVPANPPTNFSSAKFASFITQYSTGQVSVEIEWELQKENSKRWNPEIQYTSNYNKSVNVDFTVDTNGVYSEPRPIGTRYLTRNL

SEQ ID NO: 500 - DNA, 2217 bp, Adeno-associated virus
  source 1..2217: mol_type = unassigned DNA
atggctgccgatggttatcttccagattggctcgaggacaacctctctgagggcattcgcgagtggtgggcgctgaaacctggagccccgaagcccaaagccaaccagcaaaagcaggacgacggccggggtctggtgcttcctggctacaagtacctcggacccttcaacggactcgacaagggggagcccgtcaacgcggcggacgcagcggccctcgagcacgacaaggcctacgaccagcagctgcaggcgggtgacaatccgtacctgcggtataatcacgccgacgccgagtttcaggagcgtctgcaagaagatacgtcttttgggggcaacctcgggcgagcagtcttccaggccaagaagcgggttctcgaacctctcggtctggttgaggaaggcgctaagacggctcctggaaagaagagaccggtagagccgtcaccacagcgttcccccgactcctccacgggcatcggcaagaaaggccagcagcccgccagaaagagactcaatttcggtcagactggcgactcagagtcagtccccgaccctcaacctatcggagaacctccagcagcgccctctagtgtgggatctggtacaatggctgcaggcggtggcgcgccaatggcagacaataacgaaggtgccgacggagtgggtagttcctcgggaaattggcattgcgattccacatggctgggcgacagagtcatcaccaccagcacccgaacctgggccctgcccacctacaacaaccacctctacaagcaaacctccaacgggacctcgggaggcagcaccaacgacaacacctactttggctacagcaccccctgggggtattttgactttaacagattccactgccacttctcaccacgtgactggcagcgactcatcaacaacaactggggattccggcccaagagactcagcttcaagctcttcaacatccaggtcaaagaggtcacgcagaatgaaggcaccaagaccatcgccaataacctcaccagcaccatccaggtgtttacggactcggaataccagctgccgtacgtcctcggctctgcccaccagggctgcctgcctccgttcccggcggacgtcttcatgattcctcagtacggctacctgactctcaacaacggtagtcaggccgtgggacgttcctccttctactgcctggagtacttcccctctcagatgctgagaacgggcaacaacttttccttcagctacactttcgaggacgtgcctttccacagcagctacgcgcacagccagagtttggacaggctgatgaatcctctcatcgaccagtacctgtactacctgtcaagaacccagtctacgggaggcacagcgggaacccagcagttgctgttttctcaggccgggcctagcaacatgtcggctcaggccagaaactggctgcctggaccctgctacagacagcagcgcgtctccacgacactgtcgcaaaacaacaacagcaactttgcctggactggtgccaccaagtatcatctgaacggcagagactctctggtgaatccgggcgtcgccatggcaaccaacaaggacgacgaggaccgcttcttcccatccagcggcatcctcatgtttggcaagcagggagctggaaaagacaacgtggactatagcaacgtgatgctaaccagcgaggaagaaatcaagaccaccaaccccgtggccacagaacagtatggcgtggtggctgataacctacagcagcaaaacaccgctcctattgtgggggccgtcaacagccagggagccttacctggcatggtctggcagaaccgggacgtgtacctgcagggtcctatttgggccaagattcctcacacagatggcaactttcacccgtctcctttaatgggcggctttggacttaaacatccgcctcctcagatcctcatcaaaaacactcctgttcctgcggatcctccaacagcgttcaaccaggccaagctgaattctttcatcacgcagtacagcaccggacaagtcagcgcggagatcgagtgggagctgcagaaggagaacagcaagcgctggaacccagagattcagtatacttccaactactacaaatctacaaatgtggactttgctgttaatactgagggtgtttactctgagcctcgccccattggcactcgttacctcacccgtaatctgtaa

SEQ ID NO: 501 - protein, 738 aa, Adeno-associated virus
MAADGYLPDWLEDNLSEGIREWWALKPGAPKPKANQQKQDDGRGLVLPGYKYLGPFNGLDKGEPVNAADAAALEHDKAYDQQLQAGDNPYLRYNHADAEFQERLQEDTSFGGNLGRAVFQAKKRVLEPLGLVEEGAKTAPGKKRPVEPSPQRSPDSSTGIGKKGQQPARKRLNFGQTGDSESVPDPQPIGEPPAAPSSVGSGTMAAGGGAPMADNNEGADGVGSSSGNWHCDSTWLGDRVITTSTRTWALPTYNNHLYKQTSNGTSGGSTNDNTYFGYSTPWGYFDFNRFHCHFSPRDWQRLINNNWGFRPKRLSFKLFNIQVKEVTQNEGTKTIANNLTSTIQVFTDSEYQLPYVLGSAHQGCLPPFPADVFMIPQYGYLTLNNGSQAVGRSSFYCLEYFPSQMLRTGNNFSFSYTFEDVPFHSSYAHSQSLDRLMNPLIDQYLYYLSRTQSTGGTAGTQQLLFSQAGPSNMSAQARNWLPGPCYRQQRVSTTLSQNNNSNFAWTGATKYHLNGRDSLVNPGVAMATNKDDEDRFFPSSGILMFGKQGAGKDNVDYSNVMLTSEEEIKTTNPVATEQYGVVADNLQQQNTAPIVGAVNSQGALPGMVWQNRDVYLQGPIWAKIPHTDGNFHPSPLMGGFGLKHPPPQILIKNTPVPADPPTAFNQAKLNSFITQYSTGQVSAEIEWELQKENSKRWNPEIQYTSNYYKSTNVDFAVNTEGVYSEPRPIGTRYLTRNL

SEQ ID NO: 502 - DNA, 2217 bp, Adeno-associated virus
  source 1..2217: mol_type = unassigned DNA
atggctgctgacggttatcttccagattggctcgaggacaacctctctgagggcattcgcgagtggtgggacctgaaacctggagcccccaagcccaaggccaaccagcagaagcaggacgacggccggggtctggtgcttcctggctacaagtacctcggacccttcaacggactcgacaagggggagcccgtcaacgcggcggacgcagcggccctcgagcacgacaaggcctacgaccagcagctcaaagcgggtgacaatccgtacctgcggtataatcacgccgacgccgagtttcaggagcgtctgcaagaagatacgtcttttgggggcaacctcgggcgagcagtcttccaggccaagaagcgggttctcgaacctctcggtctggttgaggaagctgctaagacggctcctggaaagaagagaccggtagaaccgtcacctcagcgttcccccgactcctccacgggcatcggcaagaaaggccagcagcccgctagaaagagactgaactttgggcagactggcgactcagagtcagtccccgaccctcaaccaatcggagaacctccagcagcgccctctagtgtgggatctggtacaatggccgcaggcggtggcgcaccaatggcagacaataacgaaggtgccgacggagtgggtagttcctcgggaaattggcattgcgattccacatggctgggcgacagagtcatcaccaccagcacccgaacctgggccctgcccacctacaacaaccacctctacaagcaaatctccaacgggacctcgggaggcagcaccaacgacaacacctactttggctacagcaccccctgggggtattttgactttaacagattccactgccacttctcaccacgtgactggcagcgactcatcaacaacaactggggattccggcccaagagactcagcttcaagctcttcaacatccaggtcaaagaggtcacgcagaatgaaggcaccaagaccatcgccaataacctcaccagcaccatccaggtgtttacggactcggaataccagctgccgtacgtcctcggctctgcccaccagggctgcctgcctccgttcccggcggacgtcttcatgattcctcagtacggctacctgactctcaacaacggtagtcaggccgtgggacgttcctccttctactgcctggagtacttcccctctcagatgctgagaacgggcaacaacttttccttcagctacactttcgaggacgtgcctttccacagcagctacgcgcacagccagagtttggacaggctgatgaatcctctcatcgaccagtacctgtactacctgtcaagaacccagtctacgggaggcacagcgggaacccagcagctgctgttttctcaggccgggcctagcaacatgtcggctcaggccagaaactggctgcctggaccctgctacagacagcagcgcgtctccacgacactgtcgcaaaacaacaacagcaactttgcctggactggtgccaccaagtatcatctgaacggcagagactctctggtgaatccgggcgtcgccatggcaaccaacaaggacgacgaggaccgcttcttcccatccagcggcatcctcatgtttggcaagcagggagctggaaaagacaacgtggactatagcaacgtgatgctaaccagcgaggaagaaatcaagaccaccaaccccgtggccacagaacagtatggcgtggtggctgataacctacagcagcaaaacaccgctcctattgtgggggccgtcaacagccagggagccttacctggcatggtctggcagaaccgggacgtgtacctgcagggtcctatttgggccaagattcctcacacagatggcaactttcacccgtctcctttaatgggcggctttggacttaaacatccgcctcctcagatcctcatcaaaagcactcctgttcctgcggatcctccaacagcgttcaaccaggccaagctgaattctttcatcacgcagtacagcaccggacaagtcagcgtggagatcgagtgggagctgcagaaggagaacagcaagtgctggaacccagagattcagtatacttccaactactacaaatctacaaatgtggactttgctgttaatactgagggtgtttactctgagcctcgccccattggcactcgttacctcacccgtaatctgtaa

SEQ ID NO: 503 - protein, 738 aa, Adeno-associated virus
MAADGYLPDWLEDNLSEGIREWWDLKPGAPKPKANQQKQDDGRGLVLPGYKYLGPFNGLDKGEPVNAADAAALEHDKAYDQQLKAGDNPYLRYNHADAEFQERLQEDTSFGGNLGRAVFQAKKRVLEPLGLVEEAAKTAPGKKRPVEPSPQRSPDSSTGIGKKGQQPARKRLNFGQTGDSESVPDPQPIGEPPAAPSSVGSGTMAAGGGAPMADNNEGADGVGSSSGNWHCDSTWLGDRVITTSTRTWALPTYNNHLYKQISNGTSGGSTNDNTYFGYSTPWGYFDFNRFHCHFSPRDWQRLINNNWGFRPKRLSFKLFNIQVKEVTQNEGTKTIANNLTSTIQVFTDSEYQLPYVLGSAHQGCLPPFPADVFMIPQYGYLTLNNGSQAVGRSSFYCLEYFPSQMLRTGNNFSFSYTFEDVPFHSSYAHSQSLDRLMNPLIDQYLYYLSRTQSTGGTAGTQQLLFSQAGPSNMSAQARNWLPGPCYRQQRVSTTLSQNNNSNFAWTGATKYHLNGRDSLVNPGVAMATNKDDEDRFFPSSGILMFGKQGAGKDNVDYSNVMLTSEEEIKTTNPVATEQYGVVADNLQQQNTAPIVGAVNSQGALPGMVWQNRDVYLQGPIWAKIPHTDGNFHPSPLMGGFGLKHPPPQILIKSTPVPADPPTAFNQAKLNSFITQYSTGQVSVEIEWELQKENSKCWNPEIQYTSNYYKSTNVDFAVNTEGVYSEPRPIGTRYLTRNL

SEQ ID NO: 504 - protein, 738 aa, Adeno-associated virus
MAADGYLPDWLEDNLSEGIREWWDLKPGAPKPKANQQKQDDGRGLVLPGYKYLGPFNGLDKGEPVNAADAAALEHDKAYDQQLKAGDNPYLRYNHADAEFQERLQEDTSFGGNLGRAVFQAKKRVLEPLGLVEEAAKTAPGKKRPVEPSPQRSPDSSTGIGKKGQQPARKRLNFGQTGDSESVPDPQPIGEPPAAPSSVGSGTMAAGGGAPMADNNEGADGVGSSSGNWHCDSTWLGDRVITTSTRTWALPTYNNHLYKQISNGTSGGSTNDNTYFGYSTPWGYFDFNRFHCHFSPRDWQRLINNNWGFRPKRLSFKLFNIQVKEVTQNEGTKTIANNLTSTIQVFTDSEYQLPYVLGSAHQGCLPPFPADVFMIPQYGYLTLNNGSQAVGRSSFYCLEYFPSQMLRTGNNFSFSYTFEDVPFHSSYAHSQSLDRLMNPLIDQYLYYLSRTQSTGGTAGTQQLLFSQAGPSNMSAQARNWLPGPCYRQQRVSTTLSQNNNSNFAWTGATKYHLNGRDSLVNPGVAMATNKDDEDRFFPSSGILMFGKQGAGKDNVDYSNVMLTSEEEIKTTNPVATEQYGVVADNLQQQNTAPIVGAVNSQGALPGMVWQNRDVYLQGPIWAKIPHTDGNFHPSPLMGGFGLKHPPPQILIKSTPVPADPPTAFNQAKLNSFITQYSTGQVSVEIEWELQKENSKRWNPEIQYTSNYYKSTNVDFAVNTEGVYSEPRPIGTRYLTRNL

SEQ ID NO: 505 - DNA, 2217 bp, Adeno-associated virus
  source 1..2217: mol_type = unassigned DNA
atggctgctgacggttatcttccagattggctcgaggacaacctctctgagggcattcgcgagtggtgggacctgaaacctggagcccccaagcccaaggccaaccagcagaagcaggacgacggccggggtctggtgcttcctggctacaagtacctcggacccttcaacggactcgacaagggggagcccgtcaacgcggcggacgcagcggccctcgagcacgacaaggcctacgaccagcagctcaaagcgggtgacaatccgtacctgcggtataaccacgccgacgccgagtttcaggagcgtctgcaagaagatacgtcttttgggggcaacctcgggcgagcagtcttccaggccaagaagcgggttctcgaacctctcggtctggttgaggaagctgctaagacggctcctggaaagaagagaccggtagaaccgtcacctcagcgttcccccgactcctccacgggcatcggcaagaaaggccagcagcccgctagaaagagactgaactttgggcagactggcgactcagagtcagtccccgaccctcaaccaatcggagaaccaccagcaggcccctctggtctgggatctggtacaatggctgcaggcggtggcgcaccaatggctgacaataacgagggcgccgacggagtgggtaatgcctcaggaaattggcattgcgattccacatggctgggcgacagagtcatcaccaccagcacccgaacctgggctttgcccacctacaacaaccacctctacaagcaaatctccagtcagtcagcaggtagcaccaacgacaacgtctacttcggctacagcaccccctgggggtattttgacttcaacagattccactgtcacttctcaccacgtgactggcagcggctcatcaacaacaactggggattccggcccaagaagctcaacttcaagctgttcaacatccaggtcaaggaggtcacaacgaatgacggcgtcacgaccatcgccaataaccctaccagcacggttcaggtcttttcggactcggaataccagctgccctacgtcctcggctccgcacaccagggctgcctgcctccgttcccggcggacgtcttcatgattccccagtacggctacctgactctgaacaatggcagccaatcggtgggtcgttcctctttctactgcctggaatatttcccttctcaaatgctgagaacgggcaacaacttcaccttcagctacaccttcgaggacgttcccttccacagcagctacgcacacagccagagcctggaccggctgatgaatcctcttatcgaccagtacctgtattacctggccagaacacagagcaacgcaggaggcacagctggcaatcgggaactgcagttttatcagggcgggcctaccaccatggccgaacaagccaaaaactggctgcctggaccctgctacagacagcagcgcgtctccacgacactgtcgcaaaacaacaacagcaactttgcctggactggtgccaccaagtatcatctgaacggcagagactctctggtgaatccgggcgtcgccatggcaaccaacaaggacgacgaggaccgcttcttcccatccagcggcatcctcatgtttggcaagcagggagctggaaaagacaacgtggactatagcaacgtgatgctaaccagcgaggaagaaatcaagaccaccaaccccgtggccacagaacagtatggcgtggtggctgataacctacagcagcaaaacaccgctcctattgtgggggccgtcaacagccagggagccttacctggcatggtctggcagaaccgggacgtgtacctgcagggtcctatttgggccaagattcctcacacagatggcaactttcacccgtctcctttaatgggcggctttggacttaaacatccgcctcctcagatcctcatcaaaaacactcctgttcctgcggatcctccaacagcgttcaaccaggccaagctgaattctttcatcacgcagtacagcaccggacaagtcagcgtggagatcgagtgggagctgcagaaggagaacagcaagcgctggaacccagagattcagtatacttccaactactacaaatctacaaatgtggactttgctgttaatactgagggtgtttactctgagcctcgccccattggcactcgttacctcacccgtaatctgtaa

SEQ ID NO: 506 - protein, 738 aa, Adeno-associated virus
MAADGYLPDWLEDNLSEGIREWWDLKPGAPKPKANQQKQDDGRGLVLPGYKYLGPFNGLDKGEPVNAADAAALEHDKAYDQQLKAGDNPYLRYNHADAEFQERLQEDTSFGGNLGRAVFQAKKRVLEPLGLVEEAAKTAPGKKRPVEPSPQRSPDSSTGIGKKGQQPARKRLNFGQTGDSESVPDPQPIGEPPAGPSGLGSGTMAAGGGAPMADNNEGADGVGNASGNWHCDSTWLGDRVITTSTRTWALPTYNNHLYKQISSQSAGSTNDNVYFGYSTPWGYFDFNRFHCHFSPRDWQRLINNNWGFRPKKLNFKLFNIQVKEVTTNDGVTTIANNPTSTVQVFSDSEYQLPYVLGSAHQGCLPPFPADVFMIPQYGYLTLNNGSQSVGRSSFYCLEYFPSQMLRTGNNFTFSYTFEDVPFHSSYAHSQSLDRLMNPLIDQYLYYLARTQSNAGGTAGNRELQFYQGGPTTMAEQAKNWLPGPCYRQQRVSTTLSQNNNSNFAWTGATKYHLNGRDSLVNPGVAMATNKDDEDRFFPSSGILMFGKQGAGKDNVDYSNVMLTSEEEIKTTNPVATEQYGVVADNLQQQNTAPIVGAVNSQGALPGMVWQNRDVYLQGPIWAKIPHTDGNFHPSPLMGGFGLKHPPPQILIKNTPVPADPPTAFNQAKLNSFITQYSTGQVSVEIEWELQKENSKRWNPEIQYTSNYYKSTNVDFAVNTEGVYSEPRPIGTRYLTRNL

SEQ ID NO: 507 - DNA, 2208 bp, Adeno-associated virus
  source 1..2208: mol_type = unassigned DNA
atggctgccgatggttatcttccagattggctcgaggacaacctctctgagggcattcacgagtggtgggacccgaaacctggagccccgaaacccaaagccaaccagcaaaagcaggacgacggccggggtctggtgcttcctggctacaagtacctcggacccttcaacggactcgacaagggggagcccgtcaacgcggcggacgcagcggccctcgagcacgacaaggcctacgaccagcagctcaaagcgggtgacaatccgtacctgcggtataatcacgccgacgccgagtttcaggagcgtctgcaagaagatacgtcttttgggggcaacctcgggcgagcagtcttccaggccaagaagcgggttctcgaacctctcggtctggttgaggaaggcgctaagacggctcctggaaagaagagaccggtagagccgtcaccacagcgttcccccgactcctccacgggcatcggcaagaaaggccagcagcccgccagaaagagactcaatttcggtcagactggcgactcagagtcagtccccgaccctcaacctatcggagaacctccagcagcgccctctagtgtgggatctggtacaatggctgcaggcggtggcgcaccaatggcagacaataacgaaggtgccgacggagtgggtagttcctcgggaaattggcattgcgattccacatggctgggcgacagagtcatcaccaccagcacccgaacctgggccctgcccacccacaacaaccacctctacaagcaaatctccaacgggacctcgggaggcagcaccaacgacaacgtctacttcggctacagcaccccctgggggtattttgacttcaacagattccactgtcacttctcaccacgtgaccggcagcgactcatcaacaacaactggggattccggcccaagagactcagcttcaagctcttcaacatccaggtcaaagaggtcacgcagaatgaaggcaccaagaccatcgccaataacctcaccagcaccatccaggtgtttacggactcggaataccagctgccgtacgtcctcggctctgcccaccagggctgcctgcctccgttcccggcggacgtcttcatgattcctcagtacggctacctgactctcaacaacggtagtcaggccgtgggacgttcctccttctactgcctggagtacttcccctctcagatgctgagaacgggcaacaacttttccttcagctacactttcgaggacgtgcctttccacagcagctacgcgcacagccagagtttggacaggctgatgaatcctctcatcgaccagtacctgtactacctgtcaagaacccagtctacggaaggcacagcgggaacccagcagttgctgttttctcaggccgggcctagcaacatgtcggctcaggccagaaactggctgcctggaccctgctacagacagcagcgcgtctccacgacactgtcgcaaaacaacaacagcaactttgcctggactggtgccaccaagtatcatctgaacggcagagactctctggtgaatccgggcgtcgccatggcaacccacaaggacgacgaggaacgcttcttcccttcgagcggagtcctgatttttggaaaaactggagcagctaataagactacactggaaaatgtgttaatgacaaatgaagaggaaattcgtcctaccaacccggtagccaccgaggaatacgggactgttagcagcaacctgcaggcggctaacactgcagcccagacacaagttgtcaacaaccagggagccttacctggtatggtctggcagaaccgggacgtgtacctgcagggtcccatctgggccaagattcctcacacggacggcaactttcacccgtctccgctgatgggcggctttggactgaagcatcctcagatcctgatcaaaaacactcctgttcctgctaatcccccggaggtgtttacgcctgccaagtttgcttctttcatcacacagtacagcaccggccaggtcagcgtggagatcgagtgggagctgcagaaggagaacagcaagcgctggaacccagagattcagtatacctccaattttgacaaacagactggtgtggactttgccgttgacagccagggtgtttattctgagcctcgccccattggtactcgttacctcacccgtaatctgtaa

SEQ ID NO: 508 - protein, 735 aa, Adeno-associated virus
MAADGYLPDWLEDNLSEGIHEWWDPKPGAPKPKANQQKQDDGRGLVLPGYKYLGPFNGLDKGEPVNAADAAALEHDKAYDQQLKAGDNPYLRYNHADAEFQERLQEDTSFGGNLGRAVFQAKKRVLEPLGLVEEGAKTAPGKKRPVEPSPQRSPDSSTGIGKKGQQPARKRLNFGQTGDSESVPDPQPIGEPPAAPSSVGSGTMAAGGGAPMADNNEGADGVGSSSGNWHCDSTWLGDRVITTSTRTWALPTHNNHLYKQISNGTSGGSTNDNVYFGYSTPWGYFDFNRFHCHFSPRDRQRLINNNWGFRPKRLSFKLFNIQVKEVTQNEGTKTIANNLTSTIQVFTDSEYQLPYVLGSAHQGCLPPFPADVFMIPQYGYLTLNNGSQAVGRSSFYCLEYFPSQMLRTGNNFSFSYTFEDVPFHSSYAHSQSLDRLMNPLIDQYLYYLSRTQSTEGTAGTQQLLFSQAGPSNMSAQARNWLPGPCYRQQRVSTTLSQNNNSNFAWTGATKYHLNGRDSLVNPGVAMATHKDDEERFFPSSGVLIFGKTGAANKTTLENVLMTNEEEIRPTNPVATEEYGTVSSNLQAANTAAQTQVVNNQGALPGMVWQNRDVYLQGPIWAKIPHTDGNFHPSPLMGGFGLKHPQILIKNTPVPANPPEVFTPAKFASFITQYSTGQVSVEIEWELQKENSKRWNPEIQYTSNFDKQTGVDFAVDSQGVYSEPRPIGTRYLTRNL

SEQ ID NO: 509 - protein, 738 aa, Adeno-associated virus
MAADGYLPDWLEDNLSEGIREWWDLKPGAPKPKANQQKQDDGRGLVLPGYKYLGPFNGLDKGEPVNAADAAALEHDKAYDQQLKAGDNPYLRYNHADAEFQERLQEDTSFGGNLGRAVFQAKKRVLEPLGLVEEGAKTAPGKKRPVEPSPQRSPDSSTGIGKKGQQPARKRLNFGQTGDSESVPDPQPIGEPPAAPSSVGSGTMAAGGGAPMADNNEGADGVGSSSGNWHCDSTWLGDRVITTSTRTWALPTYNNHLYKQISNGTSGGSTNDNTYFGYSTPWGYFDFNRFHCHFSPRDWQRPINNNWGFRPKRLSFKLFNIQVKEVTQNEGTKTIANNLTSTIQVFTDSEYQLPYVLGSAHQGCLPPFPADVFMIPQYGYLTLNNGSQAVGRSSFYCLEYFPSQMLRTGNNFSFSYPFEDVPFHSSYAHSQSLDRLMNPLIDQYLYYLSRTQSTGGTAGTQQLLFSQAGPSNMSAQARNWLPGPCYRQQRVSTTLSQNNNSNFAWTGATKYHLNGRDSLVNPGVAMATNKDDEDRFFPSSGILMFGKQGAGKDNVDYSNVMLTSEEEIKTTNPVATEQYGVVADNLQQQDTAPIVGAVNSQGALPGMVWQNRDVYLQGPIWAKIPHTDGNFHPSPLMGGFGLKHPPPQVLIKNTPVPADPPTAFNQAKLNSFITQYSTGQVSVEIEWELQKENSKRWNPEIQYTSNYYKSTNVDFAVNTEGVYSEPRPIGTRYLTRNL

SEQ ID NO: 510 - DNA, 2217 bp, Adeno-associated virus
  source 1..2217: mol_type = unassigned DNA
atggctgccgatggttatcttccagattggctcgaggacaacctctctgagggcattcgcgagtggtgggacctgaaacctggagccccgaaacccaaggccaaccagcaaaagcaggacgacggccggggtctggtgcttcctggctacaagtacctcggacccttcaacggactcgacaagggggagcccgtcaacgcggcggacgcagcggccctcgagcacgacaaggcctacgaccagcagctcaaagcgggtgacaatccgtacctgcggtataatcacgccgacgccgagtttcaggagcgtctgcaagaagatacgtcttttgggggcaacctcgggcgagcagtcttccaggccaagaagcgggttctcgaacctctcggtctggttgaggaaggcgctaagacggctcctggaaagaagagaccggtagagccgtcaccacagcgttcccccgactcctccacgggcatcggcaagaaaggccagcagcccgccagaaagagactcaatttcggtcagactggcgactcagagtcagtccccgaccctcaacctatcggagaacctccagcagcgccctctagtgtgggatctggtacaatggctgcaggcggtggcgcaccaatggcagacaataacgaaggtgccgacggagtgggtagttcctcgggaaattggcattgcgattccacatggctgggcgacagagtcatcaccaccagcacccgaacctgggccctgcccacctacaacaaccacctctacaagcaaatctccaacgggacctcgggaggcagcaccaacgacaacacctactttggctacagcaccccctgggggtattttgactttaacagattccactgccacttctcaccacgtgactggcagcgacccatcaacaacaactggggattccggcccaagagactcagcttcaagctcttcaacatccaggtcaaagaggtcacgcagaatgaaggcaccaagaccatcgccaataacctcaccagcaccatccaggtgtttacggactcggaataccagctgccgtacgtcctcggctctgcccaccagggctgcctgcctccgttcccggcggacgtcttcatgattcctcagtacggctacctgactctcaacaacggtagtcaggccgtgggacgttcctccttctactgcctggagtacttcccctctcagatgctgagaacgggcaacaacttttccttcagctaccctttcgaggacgtgcctttccacagcagctacgcgcacagccagagtttggacaggctgatgaatcctctcatcgaccagtacctgtactacctgtcaagaacccagtctacgggaggcacagcgggaacccagcagttgctgttttctcaggccgggcctagcaacatgtcggctcaggccagaaactggctgcctggaccctgctacagacagcagcgcgtctccacgacactgtcgcaaaacaacaacagcaactttgcctggactggtgccaccaagtatcatctgaacggcagagactctctggtgaatccgggcgtcgccatggcaaccaacaaggacgacgaggaccgcttcttcccatccagcggcatcctcatgtttggcaagcagggagctggaaaagacaacgtggactatagcaacgtgatgctaaccagcgaggaagaaatcaagaccaccaaccccgtggccacagaacagtatggcgtggtggctgataacctacagcagcaagacaccgctcctattgtgggggccgtcaacagccagggagccttacctggcatggtctggcagaaccgggacgtgtacctgcagggtcctatttgggccaagattcctcacacagatggcaactttcacccgtctcctttaatgggcggctttggacttaaacatccgcctcctcaggtcctcatcaaaaacactcctgttcctgcggatcctccaacagcgttcaaccaggccaagctgaattctttcatcacgcagtacagcaccggacaagtcagcgtggagatcgagtgggagctgcagaaggagaacagcaagcgctggaacccagagattcagtatacttccaactactacaaatctacaaatgtggactttgctgttaatactgagggtgtttactctgagcctcgccccattggcactcgttacctcacccgtaatctgtaa

SEQ ID NO: 511 - DNA, 2214 bp, Adeno-associated virus
  source 1..2214: mol_type = unassigned DNA
atggctgctgacggttatcttccagattggctcgaggacaacctctctgagggcattcgcgagtggtgggacctgaaacctggagcccccaagcccaaggccaaccagcagaagcaggacgacggccggggtctggtgcttcctggctacaagtacctcggacccttcaacggactcgacaagggggagcccgtcaacgcggcggacgcagcggccctcgagcacgacaaggcctacgaccagcagctcaaagcgggtgacaatccgtacctgcggtataaccacgccgacgccgagttccaggagcgtctgcaagaagatacgtcttttgggggcaacctcgggcgagcagtcttccaggccaagaagcgggttctcgaacctctcggtctggctgaggaagctgctaagacggctcctggaaagaagagaccggtagaaccgtcacctcagcgttcccccgactcctccacgggcatcggcaagaaaggccagcagcccgctagaaagagactgaactttgggcagactggcgactcagagtcagtccccgaccctcaaccaatcggagagccaccagcaggcccctctggtctgggatctggtacaatggctgcaggcggtggcgcaccaatggctgacaataacaagggcgccgacggagtgggtaatgcctcaggaaattggcattgcgattccacatggctgggcgacagagtcatcaccaccagcacccgaacctgggctttgcccacctacaacaaccacctctacaagcaaatctccagtcagtcagcaggtagcaccaacgacaacgtctacttcggctacagcaccccctgggggtattttgacttcaacagattccactgtcacttctcaccacgtgactggcagcggctcatcaacaacaactggggattccggcccaagaagctcaacttcaagctgttcaacatccaggtcaaggaggtcacaacgggtgacggcgtcacgaccatcgccaataaccttaccagcacggttcaggtcttttcggactcggaataccagctgccctacgtcctcggctccgcacaccagggctgcctgcctccgttcccggcggacgtcttcatgattccccagtacggctacctgactctgaacaatgacagccaatcggtgggtcgttcctctttctactgcctggaatatttcccttctcaaatgctgagaacgggcaacaacttcaccttcagctacaccttcgaggacgttcccttccacagcagctacgcacacagccagagcctggaccggctgatgaatcctcttatcgaccagtacctgtattacctggccagaacacagagcaacgcaggaggcacagctggcaatcgggaactgcagttttatcagggcgggcctaccaccatggccgaacaagccaaaaactggctgcctggaccttgcttccggcaacaaagagtctccaagacgctggatcaaaacaacaacagcaactttgcttggactggtgccaccaaataccatctaaatggaagaaattcattggttaatcccggtgtcgccatggcaacccacaaggacgacgaggaacgcttcttcccttcgagcggagtcctgatttttggaaaaactggagcagctaataagactacactggaaaatgtgttaatgacaaatgaagaggaaattcgtcctaccaacccggtagccaccgaggaatacgggactgttagcagcaacctgcaggcggctaacactgcagcccagacacaagttgtcaacaaccagggagccttacctggtatggtctggcagaaccgggacgtgtacctgcagggtcccatctgggccaagattcctcacacggacggcaactttcacccgtctccgctgatgggcggctttggactgaagcatccgcctcctcagatcctgatcaaaaacactcctgttcctgctaatcccccggaggtgtttacgcctgccaagtttgcttctttcatcacacagtacagcaccggccaggtcagcgtggagatcgagtgggagctgcagaaggagaacagcaagcgctggaacccagagattcagtatacctccaattttgacaaacagactggtgtggactttgccgttgacagccagggtgtttattctgagcctcgccccattggtactcgttacctcacccgtaatctgtaa

SEQ ID NO: 512 - protein, 737 aa, Adeno-associated virus
MAADGYLPDWLEDNLSEGIREWWDLKPGAPKPKANQQKQDDGRGLVLPGYKYLGPFNGLDKGEPVNAADAAALEHDKAYDQQLKAGDNPYLRYNHADAEFQERLQEDTSFGGNLGRAVFQAKKRVLEPLGLAEEAAKTAPGKKRPVEPSPQRSPDSSTGIGKKGQQPARKRLNFGQTGDSESVPDPQPIGEPPAGPSGLGSGTMAAGGGAPMADNNKGADGVGNASGNWHCDSTWLGDRVITTSTRTWALPTYNNHLYKQISSQSAGSTNDNVYFGYSTPWGYFDFNRFHCHFSPRDWQRLINNNWGFRPKKLNFKLFNIQVKEVTTGDGVTTIANNLTSTVQVFSDSEYQLPYVLGSAHQGCLPPFPADVFMIPQYGYLTLNNDSQSVGRSSFYCLEYFPSQMLRTGNNFTFSYTFEDVPFHSSYAHSQSLDRLMNPLIDQYLYYLARTQSNAGGTAGNRELQFYQGGPTTMAEQAKNWLPGPCFRQQRVSKTLDQNNNSNFAWTGATKYHLNGRNSLVNPGVAMATHKDDEERFFPSSGVLIFGKTGAANKTTLENVLMTNEEEIRPTNPVATEEYGTVSSNLQAANTAAQTQVVNNQGALPGMVWQNRDVYLQGPIWAKIPHTDGNFHPSPLMGGFGLKHPPPQILIKNTPVPANPPEVFTPAKFASFITQYSTGQVSVEIEWELQKENSKRWNPEIQYTSNFDKQTGVDFAVDSQGVYSEPRPIGTRYLTRNL

SEQ ID NO: 513 - DNA, 2217 bp, Adeno-associated virus
  source 1..2217: mol_type = unassigned DNA
atggctgccgatggttatcttccagattggctcgaggacaacctctctgagggcattcgcgagtggtgggacctgaaacctggagccccgaaacccaaagccaaccagcaaaagcaggacgacggccggggtctggtgcttcctggctacaagtacctcggacccttcaacggactcgacaagggggagcccgtcaacgcggcggacgcagcggccctcgagcacgacaaggcctacgaccagcagctcaaagcgggtgacaatccgtacctgcggtataatcacgccgacgccgagtttcaggagcgtctgcaagaagatacgtcttttgggggcaacctcgggcgagcagtcttccaggccaagaagcgggttctcgaacctctcggtctggttgaggaaggcgctaagacggctcctggaaagaagagaccggtagagccgtcaccacagcgttcccccgactcctccacgggcatcggcaagaaaggccagcagcccgccagaaagagactcaatttcggtcagactggcgactcagagtcagtccccgaccctcaacctatcggagaacctccagcagcgccctctagtgtgggatctggtacaatggctgcaggcggtggcgcaccaatggcagacaataacgaaggtgccgacggagtgggtagttcctcgggaaattggcattgcgattccacatggctgggcgacagagtcatcaccaccagcacccgaacctgggccctgcccacctacaacaaccacctctacaagcaaatctccaacgggacctcgggaggcagcaccaacgacaacacctactttggctacagcaccccctgggggtattttgactttaacagattccactgccacttctcaccacgtgactggcagcgactcatcaacaacaactggggattccggcccaagagactcagcttcaagctcttcaacatccaggtcaaagaggtcacgcagaatgaaggcaccaagaccatcgccaataacctcaccagcaccatccaggtgtttacggactcggaataccagctgccgtacgtcctcggctctgcccaccagggctgcctgcctccgttcccggcggacgtcttcatgattcctcagtacggctacctgactctcaacaacggtagtcaggccgtgggacgttcctccttctactgcctggagtacttcccctctcagatgctgagaacgggcaacaacttttccttcagctacactttcgaggacgtgcctttccacagcagctacgcgcacagccagagtttggacaggctgatgaatcctctcatcgaccagtacctgtactacctgtcaagaacccagtctacgggaggcacagcgggaacccagcagttgctgttttctcaggccgggcctagcaacatgtcggctcaggccagaaactggctgcctggaccctgctacagacagcagcgcgtctccacgacactgtcgcaaaacaacaacagcaactttgcctggactggtgccaccaagtatcatctgaacggcagagactctctggtgaatccgggcgtcgccatggcaaccaacaaggacgacgaggaccgcttcttcccatccagcggcatcctcatgtttggcaagcagggagctggaaaagacaacgtggactatagcaacgtgatgctaaccagcgaggaagaaatcaagaccaccaaccccgtggccacagaacagtatggcgtggtggctgataacctacagcagcaaaacaccgctcctattgtgggggccgtcaacagccagggagccttacctggcatggtctggcagaaccgggacgtgtacctgcagggtcctatttgggccaagattcctcacacagatggcaactttcacccgtctcctttaatgggcggctttggacttaaacatccgcctcctcagatcctcatcaaaaacactcctgttcctgcggatcctccaacagcgttcaaccaggccaagctgaattctttcatcacgcagtacagcaccggacaagtcagcgtggagatcgtgtgggagctgcagaaggagaacagcaagcgcaggaacccagagattcagtatacttccaactactacaaatctacaaatgtggactttgctgttaatactgagggtgtttactctgagcctcgccccattggcactcgttacctcacccgtaatctgtaa

SEQ ID NO: 514 - protein, 738 aa, Adeno-associated virus
MAADGYLPDWLEDNLSEGIREWWDLKPGAPKPKANQQKQDDGRGLVLPGYKYLGPFNGLDKGEPVNAADAAALEHDKAYDQQLKAGDNPYLRYNHADAEFQERLQEDTSFGGNLGRAVFQAKKRVLEPLGLVEEGAKTAPGKKRPVEPSPQRSPDSSTGIGKKGQQPARKRLNFGQTGDSESVPDPQPIGEPPAAPSSVGSGTMAAGGGAPMADNNEGADGVGSSSGNWHCDSTWLGDRVITTSTRTWALPTYNNHLYKQISNGTSGGSTNDNTYFGYSTPWGYFDFNRFHCHFSPRDWQRLINNNWGFRPKRLSFKLFNIQVKEVTQNEGTKTIANNLTSTIQVFTDSEYQLPYVLGSAHQGCLPPFPADVFMIPQYGYLTLNNGSQAVGRSSFYCLEYFPSQMLRTGNNFSFSYTFEDVPFHSSYAHSQSLDRLMNPLIDQYLYYLSRTQSTGGTAGTQQLLFSQAGPSNMSAQARNWLPGPCYRQQRVSTTLSQNNNSNFAWTGATKYHLNGRDSLVNPGVAMATNKDDEDRFFPSSGILMFGKQGAGKDNVDYSNVMLTSEEEIKTTNPVATEQYGVVADNLQQQNTAPIVGAVNSQGALPGMVWQNRDVYLQGPIWAKIPHTDGNFHPSPLMGGFGLKHPPPQILIKNTPVPADPPTAFNQAKLNSFITQYSTGQVSVEIVWELQKENSKRRNPEIQYTSNYYKSTNVDFAVNTEGVYSEPRPIGTRYLTRNL

SEQ ID NO: 515 - protein, 738 aa, Adeno-associated virus
MAADGYLPDWLEDNLSEGIREWWDLKPGAPKPKANQQKQDDGRGLVLPGYKYLGPFNGLDKGEPVNAADAAALEHDKAYDQQLKAGDNPYLRYNHADAEFQERLQEDTSFGGNLGRAVFQAKKRVLEPLGLVEEGAKTAPGKKRPVEPSPQRSPDSSTGIGKKGQQPARKRLNFGQTGDSESVPDPQPIGEPPAAPSSVGSGTMAAGGGAPMADNNEGADGVGSSSGNWHCDSTWLGDRVITTSTRTWALPTYNNHLYKQISNGTSGGSTNDNTYFGYSTPWGYFDFNRFHCHFSPRDWQRLINNNWGFRPKRLSFKLFNIQVKEVTQNEGTKTIANNLTSTIQVFTDSEYQLPYVLGSAHQGCLPPFPADVFMIPQYGYLTLNNGSQAVGRSSFYCLEYFPSQMLRTGNNFSFSYTFEDVPFHSSYAHSQSLDRLMNPLIDQYLYYLSRTQSTGGTAGTQQLLFSQAGPSNMSAQARNWLPGPCYRQQRVSTTLSQNNNSNFAWTGATKYHLNGRDSLVNPGVAMATNKDDEDRFFPSSGILMFGKQGAGKDNVDYSNVMLTSEEEIKTTNPVATEQYGVVADNLQQQNTAPIVGAVNSQGALPGMVWQNRDVYLQGPIWAKIPHTDGNFHPSPLMGGFGLKHPPPQILIKNTPVPADPPTAFNQAKLNSFITQYSTGQVSVEIEWELQKENSKRWNPEIQYTSNYYKSTNVDFAVNTEGVYSEPRPIGTRYLTRNL

SEQ ID NO: 516 - protein, 738 aa, Adeno-associated virus
MAADGYLPDWLEDNLSEGIREWWDLKPGAPKPKANQQKQDDGRGLVLPGYKYLGPFNGLDKGEPVNAADAAALEHDKAYDQQLKAGDNPYLRYNHADAEFQERLQEDTSFGGNLGRAVFQAKKRVLEPLGLVEEGAKTAPGKKRPVEPSPQRSPDSSTGIGKKGQQPARKRLNFGQTGDSESVPDPQPIGEPPAAPSSVGSGTMAAGGGAPMADNNEGADGVGSSSGNWHCDSTWLGDRVITTSTRTWALPTYNNHLYKQISNGTSGGSTNDNTYFGYSTPWGYFDFNRFHCHFSPRDWQRLINNNWGFRPKRLSFKLFNIQVKEVTQNEGTKTIANNLTSTIQVFTDSEYQLPYVLGSAHQGCLPPFPADVFMIPQYGYLTLNNGSQAVGRSSFYCLEYFPSQMLRTGNNFSFSYTFEDVPFHSSYAHSQSLDRLMNPLIDQYLYYLSRTQSTGGTAGTQQLLFSQAGPSNMSAQARNWLPGPCYRQQRVSTTLSQNNNSNFAWTGATKYHLNGRDSLVNPGVAMATNKDDEDRFFPSSGILMFGKQGAGKDNVDYSNVMLTSEEEIKTTNPVATEQYGVVADNLQQQNTAPIVGAVNSQGALPGMVWQNRDVYLQGPIWAKIPHTDGNFHPSPLMGGFGLKHPPPQILIKNTPVPADPPTAFNQAKLNSFITQYSTGQVSVEIVWELQKENSKRWNPEIQYTSNYYKSTNVDFAVNTEGVYSEPRPIGTRYLTRNL

SEQ ID NO: 517 - protein, 738 aa, Adeno-associated virus; identical to SEQ ID NO: 515

SEQ ID NO: 518 - DNA, 2214 bp, Adeno-associated virus
  source 1..2214: mol_type = unassigned DNA
atggctgctgacggttatcttccagattggctcgaggacaacctctctgagggcattcgcgagtggtgggacctgaaacctggagcccccaagcccaaggccaaccagcagaagcaggacgacggccggggtctggtgcttcctggctacaagtacctcggacccttcaacggactcgacaagggggagcccgtcaacgcggcggacgcagcggccctcgagcacgacaaggcctacgaccagcagctcaaagcgggtgacaatccgtacctgcggtataaccacgccgacgccgagtttcaggagcgtctgcaagaagatacgtcttttgggggcaacctcgggcgagcagtcttccaggccaagaagcgggttctcgaacctctcggtctggttgaggaagctgctaagacggctcctggaaagaagagaccggtagaaccgtcacctcagcgttcccccgactcctccacgggcatcggcaagaaaggccagcagcccgctagaaagagactgaactttgggcagactggcgactcagagtcagtccccgaccctcaaccaatcggagaaccaccagcaggcccctctggtctgggatctggtacaatggctgcaggcggtggcgctccaatggcagacaataacgaaggcgccgacggagtgggtaatgcctcaggaaattggcattgcgattccacatggctgggcgacagagtcatcaccaccagcacccgaacctgggctttgcccacctacaacaaccacctctacaagcaaatctccagtcagtcagcaggtagcaccaacgacaacgtctacttcggctacagcaccccctgggggtattttgacttcaacagattccactgtcacttctcaccacgtgactggcagcggctcatcaacaacaactggggattccggcccaagaagctcaacttcaagctgttcaacatccaggtcaaggaggtcacaacgaatgacggcgtcacgaccatcgccaataaccttaccagcacggttcaggtcttttcggactcggaataccagctgccctacgtcctcggctccgcacaccagggctgcctgcctccgttcccggcggacgtcttcatgattccccagtacggctacctgactctgaacaatggcagccaatcggtgggtcgttcctctttctactgcctggaatatttcccttctcaaatgctgagaacgggcaacaacttcaccttcagctacaccttcgaggacgttcccttccacagcagctacgcacacagccagagcctggaccggctgatgaatcctcttatcgaccagtacctgtattacctggccagaacacagagcaacgcaggaggcacagctggcaatcgggaactgcagttttatcagggcgggcctaccaccatggccgaacaagccaaaaactggctgcctagaccttgcttccggcaacaaagagtctccaagacgctggatcaaaacaacaacagcaactttgcttggactggtgccaccaaataccatctaaatggaagaaattcattggttaatcccggtgtcgccatggcaacccacaaggacgacgaggaacgcttcttcccttcgagcggagtcctgatttttggaaaaactggagcagctaataagactacactggaaaatgtgttaatgacaaatgaagaggaaattcgtcctaccaacccggtagccaccgaggaatacgggactgttagcagcaacctgcaggcggctaacactgcagcccagacacaagttgtcaacaaccagggagccttacctggtatggtctggcagaaccgggacgtgtacctgcagggtcccatctgggccaagattcctcacacggacggcaactttcacccgtctccgctgatgggcggctttggactgaagcatccgcctcctcagatcctgatcaaaaacactcctgttcctgctaatcccccggaggtgtttacgcctgccaagtttgcttctttcatcacacagtacagcaccggccaggtcagcgtggagatcgagtgggagctgcagaaggagaacagcaagcgctggaacccagagattcagtatacctccaattttgacaaacagactggtgtggactttgccgttgacagccagggtgtttattctgagcctcgccccattggtactcgttacctcacccgtaatctgtaa

SEQ ID NO: 519 - protein, 737 aa, Adeno-associated virus
MAADGYLPDWLEDNLSEGIREWWDLKPGAPKPKANQQKQDDGRGLVLPGYKYLGPFNGLDKGEPVNAADAAALEHDKAYDQQLKAGDNPYLRYNHADAEFQERLQEDTSFGGNLGRAVFQAKKRVLEPLGLVEEAAKTAPGKKRPVEPSPQRSPDSSTGIGKKGQQPARKRLNFGQTGDSESVPDPQPIGEPPAGPSGLGSGTMAAGGGAPMADNNEGADGVGNASGNWHCDSTWLGDRVITTSTRTWALPTYNNHLYKQISSQSAGSTNDNVYFGYSTPWGYFDFNRFHCHFSPRDWQRLINNNWGFRPKKLNFKLFNIQVKEVTTNDGVTTIANNLTSTVQVFSDSEYQLPYVLGSAHQGCLPPFPADVFMIPQYGYLTLNNGSQSVGRSSFYCLEYFPSQMLRTGNNFTFSYTFEDVPFHSSYAHSQSLDRLMNPLIDQYLYYLARTQSNAGGTAGNRELQFYQGGPTTMAEQAKNWLPRPCFRQQRVSKTLDQNNNSNFAWTGATKYHLNGRNSLVNPGVAMATHKDDEERFFPSSGVLIFGKTGAANKTTLENVLMTNEEEIRPTNPVATEEYGTVSSNLQAANTAAQTQVVNNQGALPGMVWQNRDVYLQGPIWAKIPHTDGNFHPSPLMGGFGLKHPPPQILIKNTPVPANPPEVFTPAKFASFITQYSTGQVSVEIEWELQKENSKRWNPEIQYTSNFDKQTGVDFAVDSQGVYSEPRPIGTRYLTRNL

SEQ ID NO: 520 - DNA, 2214 bp, Adeno-associated virus
  source 1..2214: mol_type = unassigned DNA
atggctgctgacggttatcttccagattggctcgaggacaacctctctgagggcattcgcgagtggtgggacctgaaacctggagcccccaagcccaaggccaaccagcagaagcaggacgacggccggggtctggtgcttcctggctacaagtacctcggacccttcaacggactcgacaagggggagcccgtcaacgcggcggacgcagcggccctcgagcacgacaaggcctacgaccagcagctcaaagcgggtgacaatccgtacctgcggtataaccatgccgacgccgagtttcaggagcgtctgcaagaagatacgtcttttgggggcaacctcgggcgagcagtcctccaggccaagaagcgggttctcgaacctctcggtctggttgaggaagctgctaagacggctcctggaaagaagagaccggtagaaccgtcacctcagcgttcccccgactcctccacgggcatcggcaagaaaggccagcagcccgctagaaagagactgaactttgggcagactggcgactcagagtcagtccccgaccctcaaccaatcggagaaccaccagcaggcccctctggtctgggatctggtacaatggctgcaggcggtggcgctccaatggcagacaataacgaaggcgccgacggagtgggtaatgcctcaggaaattggcattgcgattccacatggctgggcgacagagtcatcaccaccagcacccgaacctgggctttgcccacctacaacaaccacctctacaagcaaatctccagtcagtcagcaggtagcaccaacgacaacgtctacttcggctacagcaccccctgggggtattttgacttcaacagattccactgtcacttctcaccacgtgactggcagcggctcatcaacaacaactggggattccggcccaagaagctcaacttcaagctgttcaacatccaggtcaaggaggtcacaacgaatgacggcgtcacgaccatcgccaataaccttaccagcacggttcaggtcttttcggactcggaataccagctgccctacgtcctcggctccgcacaccagggctgcctgcctccgttcccggcggacgtcttcatgattccccagtacggctacctgactctgaacaatggcagccaatcggtgggtcgttcctctttctactgcctggaatatttcccttctcaaatgctgagaacgggcaacaacttcaccttcagctacaccttcgaggacgttcccttccacagcagctacgcacacagccagagcctggaccggctgatgaatcctcttatcgaccagtacctgtattacctggccagaacacagagcaacgcaggaggcacagctggcaatcgggaactgcagttttatcagggcgggcctaccaccatggccgaacaagccaaaaactggctgcctggaccttgcttccggcaacaaagagtctccaagacgctggatcaaaacaacaacagcaactttgcttggactggtgccaccaaataccatctaaatggaagaaattcattggttaatcccggtgtcgccatggcaacccacaaggacgacgaggaacgcttcttcccttcgagcggagtcctgatttttggaaaaactggagcagctaataagactacactggaaaatgtgttaatgacaaatgaagaggaaattcgtcctaccaacccggtagccaccgaggaatacgggactgttagcagcaacctgcaggcggctaacactgcagcccagacacaagttgtcaacaaccagggagccttacctggtatggtctggcagaaccgggacgtgtacctgcagggtcccatctgggccaagattcctcacacggacggcaactttcacccgtctccgctgatgggcggctttggactgaagcatccgcctcctcagatcctgatcaaaaacactcctgttcctgctaatcccccggaggtgtttacgcctgccaagtttgcttctttcatcacacagtacagcaccggccaggtcagcgtggagatcgagtgggagctgcagaaggagaacagcaagcgctggaacccagagattcagtatacctccaattttgacaaacagactggtgtggactttgccgttgacagccagggtgtttattctgagcctcgccccattggtactcgttacctcacccgtaatctgtaa

SEQ ID NO: 521 - protein, 737 aa, Adeno-associated virus; identical to SEQ ID NO: 480

SEQ ID NO: 522 - protein, 737 aa, Adeno-associated virus
MAADGYLPDWLEDNLSEGIREWWDLKPGAPKPKANQQKQDDGRGLVLPGYKYLGPFNGLDKGEPVNAADAAALEHDKAYDQQLKAGDNPYLRYNHADAEFQERLQEDTSFGGNLGRAVLQAKKRVLEPLGLVEEAAKTAPGKKRPVEPSPQRSPDSSTGIGKKGQQPARKRLNFGQTGDSESVPDPQPIGEPPAGPSGLGSGTMAAGGGAPMADNNEGADGVGNASGNWHCDSTWLGDRVITTSTRTWALPTYNNHLYKQISSQSAGSTNDNVYFGYSTPWGYFDFNRFHCHFSPRDWQRLINNNWGFRPKKLNFKLFNIQVKEVTTNDGVTTIANNLTSTVQVFSDSEYQLPYVLGSAHQGCLPPFPADVFMIPQYGYLTLNNGSQSVGRSSFYCLEYFPSQMLRTGNNFTFSYTFEDVPFHSSYAHSQSLDRLMNPLIDQYLYYLARTQSNAGGTAGNRELQFYQGGPTTMAEQAKNWLPGPCFRQQRVSKTLDQNNNSNFAWTGATKYHLNGRNSLVNPGVAMATHKDDEERFFPSSGVLIFGKTGAANKTTLENVLMTNEEEIRPTNPVATEEYGTVSSNLQAANTAAQTQVVNNQGALPGMVWQNRDVYLQGPIWAKIPHTDGNFHPSPLMGGFGLKHPPPQILIKNTPVPANPPEVFTPAKFASFITQYSTGQVSVEIEWELQKENSKRWNPEIQYTSNFDKQTGVDFAVDSQGVYSEPRPIGTRYLTRNL

SEQ ID NO: 523 - DNA, 2217 bp, Adeno-associated virus
  source 1..2217: mol_type = unassigned DNA
atggctgccgatggttatcttccagattggctcgaggacaacctctctgagggcattcgcgagtggtgggacctgaaacctggagccccgaaacccaaagccaaccagcaaaagcaggacgacggccggggtctggtgcttcctggctacaagtacctcggacccttcaacggactcgacaagggggagcccgtcaacgcggcggacgcagcggccctcgagcacgacaaggcctacgaccagcagctcaaagcgggtgacaatccgtacctgcggtataatcacgccgacgccgagtttcaggagcgtctgcaagaagatacgtcttttgggggcaacctcgggcgagcagtcttccaggccaagaagcgggttctcgaacctctcggtctggttgaggaaggcgctaagacggctcctggaaagaagagaccggtagagccgtcaccacagcgttcccccgactcctccacgggcatcggcaagaaaggccagcagcccgccagaaagagactcaatttcggtcagactggcgactcagagtcagtccccgaccctcaacctatcggagaacctccagcagcgccctctagtgtgggatctggtacaatggctgcaggcggtggcgcaccaatggcagacaataacgaaggtgccgacggagtgggtagttcctcgggaaattggcattgcgattccacatggctgggcgacagagtcatcaccaccagcacccgaacctgggccctgcccacctacaacaaccacctctacaagcaaatctccaacgggacctcgggaggcagcaccaacgacaacacctactttggctacagcaccccctgggggtattttgactttaacagattccactgccacttctcaccacgtgactggcagcgactcatcaacaacaactggggattccggcccaagagactcagcttcaagctcttcaacatccaggtcaaagaggtcacgcagaatgaaggcaccaagaccatcgccaataacctcaccagcaccatccaggtgtttacggactcggaataccagctgccgtacgtcctcggctctgcccaccagggctgcctgcctccgttcccggcggacgtcttcatgattcctcagtacggctacctgactctcaacaacggtagtcaggccgtgggacgttcctccttctactgcctggagtacttcccctctcagatgctgagaacgggcaacaacttttccttcagctacactttcgaggacgtgcctttccacagcagctacgcgcacagccagagtttggacaggctgatgaatcctctcatcgaccagtacctgtactacctgtcaagaacccagtctacgggaggcacagcgggaacccagcagttgctgttttctcaggccgggcctagcaacatgtcggctcaggccagaaactggctgcctggaccctgctacagacagcagcgcgtctccacgacactgtcgcaaaacaacaacagcaactttgcctggactggtgccaccaagtatcatctgaacggcagagactctctggtgaatccgggcgtcgccatggcaaccaacaaggacgacgaggaccgcttcttcccacccagcggcatcctcatgtttggcaagcagggagctggaaaagacaacgtggactatagcaacgtgatgctaaccagcgaggaagaaatcaagaccaccaaccccgtggccacagaacagtatggcgtggtggctgataacctacagcagcaaaacaccgctcctattgtgggggccgtcaacagccagggagccttacctggcatggtctggcagaaccgggacgtgtacctgcagggtcctatttgggccaagattcctcacacagatggcaactttcacccgtctcctttaatgggcggctttggacttaaacatccgcctcctcagatcctcatcaaaaacactcctgttcctgcggatcctccaacagcgttcaaccaggccaagctgaattctttcatcacgcagtacagcaccggacaagtcagcgtggtgatcgagtgggagctgcagaaggagaacagcaagcgctggaacccagagattcagtatacttccaactactacaaatctacaaatgtggactttgctgttaatactgagggtgtttactctgagcttcgccccattggcactcgttacctcacccgtaatctgtaa

SEQ ID NO: 524 - protein, 738 aa, Adeno-associated virus
MAADGYLPDWLEDNLSEGIREWWDLKPGAPKPKANQQKQDDGRGLVLPGYKYLGPFNGLDKGEPVNAADAAALEHDKAYDQQLKAGDNPYLRYNHADAEFQERLQEDTSFGGNLGRAVFQAKKRVLEPLGLVEEGAKTAPGKKRPVEPSPQRSPDSSTGIGKKGQQPARKRLNFGQTGDSESVPDPQPIGEPPAAPSSVGSGTMAAGGGAPMADNNEGADGVGSSSGNWHCDSTWLGDRVITTSTRTWALPTYNNHLYKQISNGTSGGSTNDNTYFGYSTPWGYFDFNRFHCHFSPRDWQRLINNNWGFRPKRLSFKLFNIQVKEVTQNEGTKTIANNLTSTIQVFTDSEYQLPYVLGSAHQGCLPPFPADVFMIPQYGYLTLNNGSQAVGRSSFYCLEYFPSQMLRTGNNFSFSYTFEDVPFHSSYAHSQSLDRLMNPLIDQYLYYLSRTQSTGGTAGTQQLLFSQAGPSNMSAQARNWLPGPCYRQQRVSTTLSQNNNSNFAWTGATKYHLNGRDSLVNPGVAMATNKDDEDRFFPPSGILMFGKQGAGKDNVDYSNVMLTSEEEIKTTNPVATEQYGVVADNLQQQNTAPIVGAVNSQGALPGMVWQNRDVYLQGPIWAKIPHTDGNFHPSPLMGGFGLKHPPPQILIKNTPVPADPPTAFNQAKLNSFITQYSTGQVSVVIEWELQKENSKRWNPEIQYTSNYYKSTNVDFAVNTEGVYSELRPIGTRYLTRNL

SEQ ID NO: 525 - DNA, 2214 bp, Adeno-associated virus
  source 1..2214: mol_type = unassigned DNA
atggctgctgacggttatcttccagattggctcgaggacaacctctctgagggcattcgcgagtggtgggacctgaaacctggagcccccaagcccaaggccaaccagcagaagcaggacgacggccggggtctggtgcttcctggctacaagtacctcggacccttcaacggactcgacaagggggagcccgtcaacgcggcggacgcagcggccctcgagcacgacaaggcctacgaccagcagctcaaagcgggtgacaatccgtacctgcggtataaccacgccgacgccgagtttcaggagcgtctgcaagaagatacgtcttttgggggcaacctcgggcgagcagtcttccaggccaagaagcgggttctcgaacctctcggtctggttgaggaagctgctaagacggctcctggaaagaagagaccggtagaaccgtcacctcagcgttcccccgactcctccacgggcatcggcaagaaaggccagcagcccgctagaaagagactgaactttgggcagactggcgactcagagtcagtccccgaccctcaaccaatcggagaaccaccagcaggcccctctggtctgggatctggtacaatggctgcaggcggtggcgccccaatggcagacaataacgaaggcgccgacggagtgggtaatgcctcaggaaattggcattgcgattccacatggctgggcgacagagtcatcaccaccagcacccgaacctgggctttgcccacctacaacaaccacctctacaagcaaatctccagtcagtcagcaggtagcaccaacgacaacgtctacttcggctacagcaccccctgggggtattttgacttcaacagattccactgtcacttctcaccacgtgactggcagcggctcatcaacaacaactggggattccggcccaagaagctcaacttcaagctgttcaacatccaggtcaaggaggtcacaacgaatgacggcgtcacgaccatcgccaataaccttaccagcacggttcaggtcttttcggactcggaataccagctgccctacgtcctcggctccgcacaccagggctgcctgcctccgttcccggcggacgtcttcatgattccccagtacggctacctgactctgaacaatggcagccaatcggtgggtcgttcctctttctactgcctggaatatttcccttctcaaatgctgagaacgggcaacaacttcaccatcagctacaccttcgaggacgttcccttccacagcagctacgcacacagccagagcctggaccggctgatgaatcctcttatcgaccagtacctgtattacctggccagaacacagagcaacgcaggaggcacagctggcaatcaggaactgcagttttatcagggcgggcctaccaccatggccgaacaagccaaaaactggctgcctggaccttgcttccggcaacaaagagtctccaagacgctggatcaaaacaacaacagcaactttgcttggactggtgccaccaaataccatctaaatggaagaaattcattggttaatcccggtgtcgccatggcaacccacaaggacgacgaggaacgcttcttcccttcgagcggagtcctgatttttggaaaaactggagcagctaataagactacactggaaaatgtgttaatgacaaatgaagaggaaattcgtcctaccaacccggtagccaccgaggaatacgggactgttagcagcaacctgcaggcggctaacactgcagcccagacacaagttgtcaacaaccagggagccttacctggtatggtctggcagaaccgggacgtgtacctgcagggtcccatctgggccaagattcctcacacagatggcaactttcacccgtctcctttaatgggcggctttggacttaaacatccgcctcctcagatcctcatcaaaaacactcctgttcctgcggatcctccaacagcgttcaaccaggccaagctgaattctttcatcacgcagtacagcaccggacaagtcagcgtggagatcgagtgggagctgcagaaggagaacagcaagcgctggaacccagagattcagtatacttccaactactacaaatctacaaatgtggactttgctgttaatactgagggtgtttactctgagcctcgccccattggcactcgttacctcacccgtaatctgtaa

SEQ ID NO: 526 - protein, 737 aa, Adeno-associated virus
MAADGYLPDWLEDNLSEGIREWWDLKPGAPKPKANQQKQDDGRGLVLPGYKYLGPFNGLDKGEPVNAADAAALEHDKAYDQQLKAGDNPYLRYNHADAEFQERLQEDTSFGGNLGRAVFQAKKRVLEPLGLVEEAAKTAPGKKRPVEPSPQRSPDSSTGIGKKGQQPARKRLNFGQTGDSESVPDPQPIGEPPAGPSGLGSGTMAAGGGAPMADNNEGADGVGNASGNWHCDSTWLGDRVITTSTRTWALPTYNNHLYKQISSQSAGSTNDNVYFGYSTPWGYFDFNRFHCHFSPRDWQRLINNNWGFRPKKLNFKLFNIQVKEVTTNDGVTTIANNLTSTVQVFSDSEYQLPYVLGSAHQGCLPPFPADVFMIPQYGYLTLNNGSQSVGRSSFYCLEYFPSQMLRTGNNFTISYTFEDVPFHSSYAHSQSLDRLMNPLIDQYLYYLARTQSNAGGTAGNQELQFYQGGPTTMAEQAKNWLPGPCFRQQRVSKTLDQNNNSNFAWTGATKYHLNGRNSLVNPGVAMATHKDDEERFFPSSGVLIFGKTGAANKTTLENVLMTNEEEIRPTNPVATEEYGTVSSNLQAANTAAQTQVVNNQGALPGMVWQNRDVYLQGPIWAKIPHTDGNFHPSPLMGGFGLKHPPPQILIKNTPVPADPPTAFNQAKLNSFITQYSTGQVSVEIEWELQKENSKRWNPEIQYTSNYYKSTNVDFAVNTEGVYSEPRPIGTRYLTRNL

SEQ ID NO: 527 - DNA, 2217 bp, Adeno-associated virus
  source 1..2217: mol_type = unassigned DNA
atggctgccgatggttatcttccagattggctcgaggacaacctctctgagggcattcgcgagtggtgggacctgaaacctggagccccgaaacccaaagccaaccagcaaaagcaggacgacggccggggtctggtgcttcctggctacaagtacctcggacccttcaacggactcgacaagggggagcccgtcaacgcggcggacgcagcggccctcgagcacgacaaggcctacgaccagcagctcaaagcgggtgacaatccgtacctgcggtataatcacgccgacgccgagtttcaggagcgtctgcaagaagatacgtcttttgggggcaacctcgggcgagcagtcttccaggccaagaagcgggttctcgaacctctcggtctggttgaggaaggcgctaagacggctcctggaaagaagagaccggtagagccgtcaccacagcgttcccccgactcctccacgggcatcggcaagaaaggccagcagcccgccagaaagagactcaatttcggtcagactggcgactcagagtcagtccccgaccctcaacctatcggagaacctccagcagcgccctctagtgtgggatctggtacaatggctgcaggcggtggcgcaccaatggcagacaataacgaaggtgccgacggagtgggtagttcctcgggaaattggcattgcgattccacatggctgggcgacagagtcatcaccaccagcacccgaacctgggccctgcccgcctacaacaaccacctctacaagcaaatctccaacgggacctcgggaggcagcaccaacgacaacacctactttggctacagcaccccctgggggtattttgactttaacagattccactgccacttctcaccacgtgactggcagcgactcatcaacaacaactggggattccggcccaagagactcagcttcaagctcttcaacatccaggtcaaagaggtcacgcagaatgaaggcaccaagaccatcgccaataacctcaccagcaccatccaggtgtttacggactcggaataccagctgccgtacgtcctcggctctgcccaccagggctgcctgcctccgttcccggcggatgtcttcatgattcctcagtacggctacctgactctcaacaacggtagtcaggccgtgggacgttcctccttctactgcctggagtacttcccctctcagatgctgagaacgggcaacaacttttccttcagctacactttcgaggacgtgcctttccacagcagctacgcgcacagccagagtttggacaggctgatgaatcctctcatcgaccagtacctgtactacctgtcaagaacccagtctacgggaggcacagcgggaacccagcagttgctgttttctcaggccgggcctagcaacatgtcggctcaggccagaaactggctgcctggaccctgctacagacagcagcgcgtctccacgacactgtcgcaaaacaacaacagcaactttgcctggactggtgccaccaagtatcatctgagcggcagagactctctggtgaatccgggcgtcgccatggcaaccaacaaggacgacgaggaccgcttcttcccatccagcggcatcctcatgtttggcaagcagggagctggaaaagacaacgtggactatagcaacgtgatgctaaccagcgaggaagaaatcaagaccaccaaccccgtggccacagaacagtatggcgtggtggctgataacctacagcagcaaaacaccgctcctattgtgggggccgtcaacagccagggagccttacctggcatggtctggcagaaccgggacgtgtacctgcagggtcctatttgggccaagattcctcacacagatggcaactttcacccgtctcctttaatgggcggctttggacttaaacatccgcctcctcagatcctcatcaaaaacactcctgttcctgcggatcctccaacagcgttcaaccaggccaagctgaattcttccatcacgcagtacagcaccggacaagtcagcgtggagatcgagtgggagctgcagaaggagaacagcaagcgctggaacccagagattcagtatacttccaactactacaaatctacaaatgtggactttgctgttaatactgagggtgtttactctgagcctcgccccattggcactcgttacctcacccgtaatttgtaa

SEQ ID NO: 528 - protein, 738 aa, Adeno-associated virus
MAADGYLPDWLEDNLSEGIREWWDLKPGAPKPKANQQKQDDGRGLVLPGYKYLGPFNGLDKGEPVNAADAAALEHDKAYDQQLKAGDNPYLRYNHADAEFQERLQEDTSFGGNLGRAVFQAKKRVLEPLGLVEEGAKTAPGKKRPVEPSPQRSPDSSTGIGKKGQQPARKRLNFGQTGDSESVPDPQPIGEPPAAPSSVGSGTMAAGGGAPMADNNEGADGVGSSSGNWHCDSTWLGDRVITTSTRTWALPAYNNHLYKQISNGTSGGSTNDNTYFGYSTPWGYFDFNRFHCHFSPRDWQRLINNNWGFRPKRLSFKLFNIQVKEVTQNEGTKTIANNLTSTIQVFTDSEYQLPYVLGSAHQGCLPPFPADVFMIPQYGYLTLNNGSQAVGRSSFYCLEYFPSQMLRTGNNFSFSYTFEDVPFHSSYAHSQSLDRLMNPLIDQYLYYLSRTQSTGGTAGTQQLLFSQAGPSNMSAQARNWLPGPCYRQQRVSTTLSQNNNSNFAWTGATKYHLSGRDSLVNPGVAMATNKDDEDRFFPSSGILMFGKQGAGKDNVDYSNVMLTSEEEIKTTNPVATEQYGVVADNLQQQNTAPIVGAVNSQGALPGMVWQNRDVYLQGPIWAKIPHTDGNFHPSPLMGGFGLKHPPPQILIKNTPVPADPPTAFNQAKLNSSITQYSTGQVSVEIEWELQKENSKRWNPEIQYTSNYYKSTNVDFAVNTEGVYSEPRPIGTRYLTRNL

SEQ ID NO: 529 - protein, 736 aa, Adeno-associated virus; identical to SEQ ID NO: 29

SEQ ID NO: 530 - DNA, 2217 bp, Adeno-associated virus
  source 1..2217: mol_type = unassigned DNA
atggctgctgacggttatcttccagattggctcgaggacaacctctctgagggcattcgcgagtggtgggacctgaaacctggagcccccaagcccaaggccaaccagcagaagcaggacgacggccggggtctggtgcttcctggctacaagtacctcggacccttcaacggactcgacaagggggagcccgtcaacgcggcggacgcagcggccctcgagcacgacaaggcctacgaccagcagctcaaagcgggtgacaatccgtacctgcggtataaccacgccgacgccgagtttcaggagcgtctgcaagaagatacgtcttttgggggcaacctcgggcgagcagtcttccaggccaagaagcgggttctcgaacctctcggtctggttgaggaagctgctaagacggctcctggaaagaagagaccggtagaaccgtcacctcagcgttcccccgactcctccacgggcatcggcaagaaaggccagcagcccgctaaaaagagactgaactttggtcagactggcgactcagagtcagtccccgaccctcaaccaatcggagaaccaccagcaggcccctctggtctgggatctggtacaatggctgcaggcggtggcgctccaatggcagacaataacgaaggcgccgacggagtgggtagttcctcaggaaattggcattgcgattccacatggctgggcgacagagtcatcaccaccagcacccgaacctgggccctgcccacctacaacaaccacctctacaagcaaatatccaatgggacatcgggaggaagcaccaacgacaacacctacttcggctacagcaccccctgggggtattttgacttcaacagattccactgccacttctcaccacgtgactggcagcgactcatcaacaacaactggggattccggccaaaaagactcagcttcaagctcttcaacatccaggtcaaggaggtcacgcagaatgaaggcaccaagaccatcgccaataaccttaccagcacgattcaggtatttacggactcggaataccagctgccgtacgtcctcggctccgcgcaccagggctgcctgcctccgttcccggcggacgtcttcatgattccccagtacggctaccttacactgaacaatggaagtcaagccgtaggccgttcctccttctactgcctggaatattttccatctcaaatgctgcgaactggaaacaattttgaattcagctacaccttcgaggacgtgcctttccacagcagctacgcacacagccagagcttggaccgactgatgaatcctctcatcgaccagtacctgtactacttatccagaactcagtccacaggaggaactcaaggtacccagcaattgttattttctcaagctgggcctgcaaacatgtcggctcaggctaagaactggctacctggaccttgctaccggcagcagcgagtctctacgacactgtcgcaaaacaacaacagcaactttgcttggactggtgccaccaaatatcacctgaacggaagagactctttggtaaatcccggtgtcgccatggcaacccacaaggacgacgaggaacgcttcttcccgtcgagtggagtcctgatgtttggaaaacagggtgctggaagagacaatgtggactacagcagcgttatgctaaccagcgaagaagaaattaaaaccactaaccctgtagccacagaacaatacggtgtggtggctgacaacttgcagcaaaccaatacagggcctattgtgggaaatgtcaacagccaaggagccttacctggcatggtctggcagaaccgagacgtgtacctgcagggtcccatctgggccaagattcctcacacggacggcaacttccacccttcaccgctaatgggaggatttggactgaagcacccacctcctcagatcctgatcaagaacacgccggtacctgcggatcctccaacaacgttcagccaggcgaaattggcttccttcattacgcagtacagcaccggacaggtcagcgtggaaatcgagtgggagctgcagaaggagaacagcaaacgctggaacccagagattcagtacacttcaaactactacaaatctacaaatgtggactttgctgtcaatacagagggaacttattctgagcctcgccccattggtactcgttacctcacccgtaatctgtaa

SEQ ID NO: 531 - protein, 738 aa, Adeno-associated virus
MAADGYLPDWLEDNLSEGIREWWDLKPGAPKPKANQQKQDDGRGLVLPGYKYLGPFNGLDKGEPVNAADAAALEHDKAYDQQLKAGDNPYLRYNHADAEFQERLQEDTSFGGNLGRAVFQAKKRVLEPLGLVEEGAKTAPGKKRPVEPSPQRSPDSSTGIGKKGQQPARKRLNFGQTGDSESVPDPQPLGEPPAAPSSVGSGTMAAGGGAPMADNNEGADGVGSSSGNWHCDSTWLGDRVITTSTRTWALPTYNNHLYKQISNGTSGGSTNDNTYFGYSTPWGYFDFNRFHCHFSPRDWQRLINNNWGFRPKRLSFKLFNIQVKEVTQNEGTKTIANNLTSTIQVFTDSEYQLPYVLGSAHQGCLPPFPADVFMIPQYGYLTLNNGSQAVGRSSFYCLEYFPSQMLRTGNNFSFSYTFEDVPFHSSYAHSQSLDRLMNPLIDQYLYYLSRTQSTGGTAGTQQLLFSQAGPSNMSAQARNWLPGPCYRQQRVSTTLSQNNNSNFAWTGATKYHLNGRDSLVNPGVAMATNKDDEDRFFPSSGILMFGKQGAGKDNVDYSNVMLTSEEEIKTTNPVATEQYGVVADNLQRQNTAPIVGAVNSQGALPGMVWQNRDVYLQGPIWAKIPHTDGNFHPSPLMGGFGLKHPPPQILIKNTPVPADPPTAFNQAKLNSFITQYSTGQVSVEIEWELQKENSKRWNPEIQYTSNYYKSTNVDFAVNTEGVYSEPRPIGTRYLTRNL

SEQ ID NO: 532 - protein, 736 aa, Adeno-associated virus
MAADGYLPDWLEDNLSEGIREWLNLKPGAPQPKANQQKQDNARGLVLPGYKYLGPFNGLDKGDPVNEADAAALEHDKAYGQQLKAGDNPYLKYNHADAEFQERLQKDTSFGGNLGKAVFQAKKRILEPLGLVETPAKTAPGKKRPVDPSPQRSPDSSSGIGKKSPHPARKRLNFGQTGEAESVPDPQPIGEPPSDPSSVGSGTMAAGGGAPMADNNEGADGVGNSSGNWHCDSTWLGDRVITTSTRTWALPTYNNHLYKQISSQSGATNDNHYFGYSTPWGYFDFNRFHCHFSPRDWQRLINNNWGFRPKRLSFKLFNIQVKEVTQNDGTTTIANNLTSTVQVFTDSEYQLPYVLGSAHQGCLPPFPADVFMIPQYGYLTLNNGSQAVGRSSFYCLEYFPSQMLRTGNNFQFSYTFEDVPFHSSYAHSQSLDRLMNPLIDQYLYYLSKTQGTNATVQGAKLQFSQAGPSNMRDQARNWLPGPCYRQQRVSKTANDNNNSEYAWTGATKYHLNGRDSLVNPGPAMASHKDDEEKFFPMNGTLVFGKNGAGNSNVDIENVMITDEEEIRTTNPVATEQYGVVSDNLQSSNTRPITGDVDSQGVLPGMVWQDRDVYLQGPIWAKIPHTDGHFHPSPLMGGFGLKHPPPQILIKNTPVPANPATTFTPGKFASFITQYSTGQVSVQIEWELQKENSKRWNPEIQYTSNYNKSVNVDFTVDTNGVYSEPRPIGTRYLTRNL

SEQ ID NO: 533 - protein, 736 aa, Adeno-associated virus; identical to SEQ ID NO: 108

SEQ ID NO: 534 - protein, 736 aa, Adeno-associated virus
MAADGYLPDWLEDNLSEGIREWWDLKPGAPKPKANQQKQDDGRGLVLPGYKYLGPFNGLDKGEPVNAADAAALEHDKAYDQQLKAGDNPYLRYNHADAEFQERLQEDTSFGGNLGRAVFQAKKRVLEPLGLVEEGAKTAPGKKRPVEQSPQEPDSSSGIGKTGQQPAKKRLNFGQTGDSESVPDPQPLGEPPAAPSGLGPNTMASGGGAPMADNNEGADGVGNSSGNWHCDSTWLGDRVITTSTRTWALPTYNNHLYKQISNGTSGGSTNDNTYFGYSTPWGYFDFNRFHCHFSPRDWQRLINNNWGFRPKRLNFKLFNIQVKEVTTNEGTKTIANNLTSTVQVFTDSEYQLPYVLGSAHQGCLPPFPADVFMVPQYGYLTLNNGSQALGRSSFYCLEYFPSQMLRTGNNFQFSYTFEDVPFHSSYAHSQSLDRLMNPLIDQYLYYLVRTQTTGTGGTQTLAFSQAGPSSMANQARNWVPGPCYRQQRVSTTTNQNNNSNFAWTGAAKFKLNGRDSLMNPGVAMASHKDDEDRFFPSSGVLIFGKQGAGNDGVDYSQVLITDEEEIKATNPVATEEYGAVAINNQAANTQAQTGLVHNQGVIPGMVWQNRDVYLQGPIWAKIPHTDGNFHPSPLMGGFGLKHPPPQILIKNTPVPADPPLTFNQAKLNSFITQYSTGQVSVEIEWELQKENSKRWNPEIQYTSNYYKSTNVDFAVNTEGVYSEPRPIGTRYLTRNL

SEQ ID NO: 535 - protein, 736 aa, synthetic construct; identical to SEQ ID NO: 534
  REGION 1..736: note = Description of Artificial Sequence: Synthetic polypeptide

SEQ ID NO: 536 - protein, 736 aa, synthetic construct
  REGION 1..736: note = Description of Artificial Sequence: Synthetic polypeptide
MAADGYLPDWLEDNLSEGIREWWDLKPGAPKPKANQQKQDDGRGLVLPGYKYLGPFNGLDKGEPVNAADAAALEHDKAYDQQLKAGDNPYLRYNHADAEFQERLQEDTSFGGNLGRAVFQAKKRVLEPLGLVEEGAKTAPGKKRPVEQSPQEPDSSSGIGKTGQQPAKKRLNFGQTGDSESVPDPQPLGEPPAAPSGLGPNTMASGGGAPMADNNEGADGVGNSSGNWHCDSTWLGDRVITTSTRTWALPTYNNHLYKQISNGTSGGSTNDNTYFGYSTPWGYFDFNRFHCHFSPRDWQRLINNNWGFRPKRLNFKLFNIQVKEVTTNEGTKTIANNLTSTVQVFTDSEYQLPYVLGSAHQGCLPPFPADVFMVPQYGYLTLNNGSQALGRSSFYCLEYFPSQMLRTGNNFQFSYTFEDVPFHSSYAHSQSLDRLMNPLIDQYLYYLVRTQTTGTGGTQTLAFSQAGPSSMANQARNWVPGPCYRQQRVSTTTNQNNNSNFAWTGAAKFKLNGRDSLMNPGVAMASHKDDEDRFFPSSGVLIFGKQGAGNDGVDYSQVLITDEEEIKATNPVATEEYGAVAINNQRANTQAQTGLVHNQGVIPGMVWQNRDVYLQGPIWAKIPHTDGNFHPSPLMGGFGLKHPPPQILIKNTPVPADPPLTFNQAKLNSFITQYSTGQVSVEIEWELQKENSKRWNPEIQYTSNYYKSTNVDFAVNTEGVYSEPRPIGTRYLTRNL

SEQ ID NO: 537 - protein, 736 aa, synthetic construct
  REGION 1..736: note = Description of Artificial Sequence: Synthetic polypeptide
MAADGYLPDWLEDNLSEGIREWWDLKPGAPKPKANQQKQDDGRGLVLPGYKYLGPFNGLDKGEPVNAADAAALEHDKAYDQQLKAGDNPYLRYNHADAEFQERLQEDTSFGGNLGRAVFQAKKRVLEPLGLVEEGAKTAPGKKRPVEQSPQEPDSSSGIGKTGQQPAKKRLNFGQTGDSESVPDPQPLGEPPAAPSGLGPNTMASGGGAPMADNNEGADGVGNSSGNWHCDSTWLGDRVITTSTRTWALPTYNNHLYKQISNGTSGGSTNDNTYFGYSTPWGYFDFNRFHCHFSPRDWQRLINNNWGFRPKRLNFKLFNIQVKEVTTNEGTKTIANNLTSTVQVFTDSEYQLPYVLGSAHQGCLPPFPADVFMVPQYGYLTLNNGSQALGRSSFYCLEYFPSQMLRTGNNFQFSYTFEDVPFHSSYAHSQSLDRLMNPLIDQYLYYLVRTQTTGTGGTQTLAFSQAGPSSMANQARNWVPGPCYRQQRVSTTTNQNNNSNFAWTGAAKFKLNGRDSLMNPGVAMASHKDDEDAFFPSSGVLIFGKQGAGNDGVDYSQVLITDEEEIKATNPVATEEYGAVAINNQAANTQAQTGLVHNQGVIPGMVWQNRDVYLQGPIWAKIPHTDGNFHPSPLMGGFGLKHPPPQILIKNTPVPADPPLTFNQAKLNSFITQYSTGQVSVEIEWELQKENSKRWNPEIQYTSNYYKSTNVDFAVNTEGVYSEPRPIGTRYLTRNL

SEQ ID NO: 538 - DNA, 1803 bp, unidentified
  source 1..1803: mol_type = unassigned DNA; note = Bovine adeno-associated virus
acggcgcctgcggcaaaaaagaggcctctagagcagagtcctcaagagccagactcctcgagcggagttggcaagaaaggcaaacagcctgccagaaagagactcaactttgacgacgaacctggagccggagacgggcctcccccagaaggaccatcttccggagctatgtctactgagactgaaatgcgtgcagcagctggcggaaatggtggcgatgcgggacaaggtgccgagggagtgggtaatgcctccggtgattggcattgcgattccacttggtcagagagccacgtcaccaccacctcaacccgcacctgggtcctgccgacctacaacaaccacctgtacctgcggctcggctcgagcaacgccagcgacaccttcaacggattctccaccccctggggatactttgactttaaccgcttccactgccacttctcgccaagagactggcaaaggctcatcaacaaccactggggactgcgccccaaaagcatgcaagtccgcatcttcaacatccaagttaaggaggtcacgacgtctaacggggagacgaccgtatccaacaacctcaccagcacggtccagatctttgcggacagcacgtacgagctcccgtacgtgatggatgcaggtcaggagggcagcttgcctcctttccccaacgacgtgttcatggtgcctcagtacgggtactgcggactggtaaccggaggcagctctcaaaaccagacagacagaaatgccttctactgtctggagtactttcccagccagatgctgagaaccggaaacaactttgagatggtgtacaagtttgaaaacgtgcccttccactccatgtacgctcacagccagagcctggataggctgatgaacccgctgctggaccagtacctgtgggagctccagtctaccacctctggaggaactctcaaccagggcaattcagccaccaactttgccaagctgaccaaaacaaacttttctggctaccgcaaaaactggctcccggggcccatgatgaagcagcagagattctccaagactgccagtcaaaactacaagattccccagggaagaaacaacagtctgctccattatgagaccagaactaccctcgacggaagatggagcaattttgccccgggaacggccatggcaaccgcagccaacgacgccaccgacttctctcaggcccagctcatctttgcggggcccaacatcaccggcaacaccaccacagatgccaataacctgatgttcacttcagaagatgaacttagggccaccaacccccgggacactgacctgtttggccacctggcaaccaaccagcaaaacgccaccaccgttcctaccgtagacgacgtggacggagtcggcgtgtacccgggaatggtgtggcaggacagagacatttactaccaagggcccatttgggccaaaattccacacacggatggacactttcacccgtctcctctcattggcggatttggactgaaaagcccgcctccacaaatattcatcaaaaacactcctgtacccgccaatcccgcaacgaccttctctccggccagaatcaacagcttcatcacccagtacagcaccggacaggtggctgtcaaaatagaatgggaaatccagaaggagcggtccaagagatggaacccagaggtccagttcacgtccaactacggagcacaggactcgcttctctgggctcccgacaacgccggagcctacaaagagcccagggccattggatcccgatacctcaccaaccacctctag

SEQ ID NO: 539 - DNA, 1617 bp, unidentified
  source 1..1617: mol_type = unassigned DNA; note = Bovine adeno-associated virus
atgcgtgcagcagctggcggaaatggtggcgatgcgggacaaggtgccgagggagtgggtaatgcctccggtgattggcattgcgattccacttggtcagagagccacgtcaccaccacctcaacccgcacctgggtcctgccgacctacaacaaccacctgtacctgcggctcggctcgagcaacgccagcgacaccttcaacggattctccaccccctggggatactttgactttaaccgcttccactgccacttctcgccaagagactggcaaaggctcatcaacaaccactggggactgcgccccaaaagcatgcaagtccgcatcttcaacatccaagttaaggaggtcacgacgtctaacggggagacgaccgtatccaacaacctcaccagcacggtccagatctttgcggacagcacgtacgagctcccgtacgtgatggatgcaggtcaggagggcagcttgcctcctttccccaacgacgtgttcatggtgcctcagtacgggtactgcggactggtaaccggaggcagctctcaaaaccagacagacagaaatgccttctactgtctggagtactttcccagccagatgctgagaaccggaaacaactttgagatggtgtacaagtttgaaaacgtgcccttccactccatgtacgctcacagccagagcctggataggctgatgaacccgctgctggaccagtacctgtgggagctccagtctaccacctctggaggaactctcaaccagggcaattcagccaccaactttgccaagctgaccaaaacaaacttttctggctaccgcaaaaactggctcccggggcccatgatgaagcagcagagattctccaagactgccagtcaaaactacaagattccccagggaagaaacaacagtctgctccattatgagaccagaactaccctcgacggaagatggagcaattttgccccgggaacggccatggcaaccgcagccaacgacgccaccgacttctctcaggcccagctcatctttgcggggcccaacatcaccggcaacaccaccacagatgccaataacctgatgttcacttcagaagatgaacttagggccaccaacccccgggacactgacctgtttggccacctggcaaccaaccagcaaaacgccaccaccgttcctaccgtagacgacgtggacggagtcggcgtgtacccgggaatggtgtggcaggacagagacatttactaccaagggcccatttgggccaaaattccacacacggatggacactttcacccgtctcctctcattggcggatttggactgaaaagcccgcctccacaaatattcatcaaaaacactcctgtacccgccaatcccgcaacgaccttctctccggccagaatcaacagcttcatcacccagtacagcaccggacaggtggctgtcaaaatagaatgggaaatccagaaggagcggtccaagagatggaacccagaggtccagttcacgtccaactacggagcacaggactcgcttctctgggctcccgacaacgccggagcctacaaagagcccagggccattggatcccgatacctcaccaaccacctctag

SEQ ID NO: 540 - DNA, 1173 bp, unidentified
  source 1..1173: mol_type = unassigned DNA; note = Bovine adeno-associated virus
atggcgctggtaagctggctggtggaacatggcatcacttccgagaagcagtggattcaggagaatcaggagagctacctgtccttcaactccacgggaaactctcggagccagattaaagccgcgcttgacaacgcgtcaaaaattatgagtctgaccaaatctgcctcagactatctcgtgggacagactgttccagaggacatttctgaaaacagaatctggcagatttttgatctcaacggctacgacccggcatacgcgggctctgttctctacggctggtgcactcgcgcctttggaaagaggaacaccgtctggctgtatggacccgcgaccaccggaaagaccaacatcgcggaagccatctctcacaccgtgcccttttatggctgtgtgaactggactaatgagaactttccctttaatgactgtgtggaaaaaatgttgatctggtgggaggagggaaagatgaccagcaaggtggtggaacccgccaaggccatcttgggggggtctagagtacgagtggatcaaaaatgtaaatcctctgtacaagtagactctaccccggtgattatcacctccaatactaacatgtgtgtggtggtggatgggaactccacgacctttgaacaccagcagccgctggaagaccgcatgttcagatttgaactcatgcggcggctcccgccagattttggcaagattaccaagcaggaagtcaaagacttttttgcttgggcaaaggtcaaccaggtgccggtgactcacgagtttatggttcccaagaaagtggcgggaactgagagggcggagacttctagaaaacgcccactggatgacgtcaccaataccaactataaaagtccggagaagcgggcccggctctcagttgttcctgagacgcctcgcagttcagacgtgcctgtagagcccgctcctctgcgacctctcaactggtcttccaggtatgaatgcagatgtgactatcatgctaaatttgactctgtaacgggggaatgtgacgagtgtgaatatttgaatcggggcaaaaatggctgtatctttcataatgctacacattgtcaaatttgtcacgctgttcctccatgggaaaaggaaaatgtgtcagattttaatgattttgatgactgtaataaagagcagtaa

SEQ ID NO: 541 - DNA, 1833 bp, unidentified
  source 1..1833: mol_type = unassigned DNA; note = Bovine adeno-associated virus
atggctaccttctatgaagtcattgttcgcgttccatttgatgtggaagagcacctgcctggaatttctgacaactttgtagactgggtaactggtcaaatttgggagctgcctcccgagtcagatttgaatttgactctgattgagcagcctcagctgacggtggctgacagaattcgccgcgtgttcctgtacgagtggaacaaattttccaagcaggagagcaaattctttgtgcagtttgaaaagggatctgaatattttcatctgcacacgctcgtggagacctccggcatctcttctatggtccttggccgctacgtgagtcagattcgcgcccagctggtgaaggtggtgttccagaacattgagccgcggattaacgactgggtcgccatcaccaaggtaaagaagggcggagccaataaggtggtggattctgggtatattcccgcctacctgctgccgaaggtccaaccagagcttcagtgggcgtggactaacctcgaagagtataaattggccgccctcaatctggaggagcgcaaacggctcgtcgctcagtttcagcttgagtcctcgcagcgctcgcaagaggcatcttcccagagggacgtttcggctgacccggtcatcaagagcaagacttcccagaaatacatggcgctggtaagctggctggtggaacatggcatcacttccgagaagcagtggattcaggagaatcaggagagctacctgtccttcaactccacgggaaactctcggagccagattaaagccgcgcttgacaacgcgtcaaaaattatgagtctgaccaaatctgcctcagactatctcgtgggacagactgttccagaggacatttctgaaaacagaatctggcagatttttgatctcaacggctacgacccggcatacgcgggctctgttctctacggctggtgcactcgcgcctttggaaagaggaacaccgtctggctgtatggacccgcgaccaccggaaagaccaacatcgcggaagccatctctcacaccgtgcccttttatggctgtgtgaactggactaatgagaactttccctttaatgactgtgtggaaaaaatgttgatctggtgggaggagggaaagatgaccagcaaggtggtggaacccgccaaggccatcttgggggggtctagagtacgagtggatcaaaaatgtaaatcctctgtacaagtagactctaccccggtgattatcacctccaatactaacatgtgtgtggtggtggatgggaactccacgacctttgaacaccagcagccgctggaagaccgcatgttcagatttgaactcatgcggcggctcccgccagattttggcaagattaccaagcaggaagtcaaagacttttttgcttgggcaaaggtcaaccaggtgccggtgactcacgagtttatggttcccaagaaagtggcgggaactgagagggcggagacttctagaaaacgcccactggatgacgtcaccaataccaactataaaagtccggagaagcgggcccggctctcagttgttcctgagacgcctcgcagttcagacgtgcctgtagagcccgctcctctgcgacctctcaactggtcttccaggtatgaatgcagatgtgactatcatgctaaatttgactctgtaacgggggaatgtgacgagtgtgaatatttgaatcggggcaaaaatggctgtatctttcataatgctacacattgtcaaatttgtcacgctgttcctccatgggaaaaggaaaatgtgtcagattttaatgattttgatgactgtaataaagagcagtaa

SEQ ID NO: 542 - DNA, 2211 bp, unidentified
  source 1..2211: mol_type = unassigned DNA; note = Bovine adeno-associated virus
atgtcttttgttgaccaccctccagattggttggaatcgatcggcgacggctttcgtgaatttctcggccttgaggcgggtcccccgaaacccaaggccaatcaacagaagcaagataacgctcgaggtcttgtgcttcctgggtacaagtatcttggtcctgggaacggccttgataagggcgatcctgtcaattttgctgacgaggttgcccgagagcacgacctctcctaccagaaacagcttgaggcgggcgataacccttacctcaagtacaaccacgcggacgcagagtttcaggagaaactcgcttctgacacttcttttgggggaaaccttgggaaggctgttttccaggctaaaaagaggattctcgaacctcttggcctggttgagacgccggataaaacggcgcctgcggcaaaaaagaggcctctagagcagagtcctcaagagccagactcctcgagcggagttggcaagaaaggcaaacagcctgccagaaagagactcaactttgacgacgaacctggagccggagacgggcctcccccagaaggaccatcttccggagctatgtctactgagactgaaatgcgtgcagcagctggcggaaatggtggcgatgcgggacaaggtgccgagggagtgggtaatgcctccggtgattggcattgcgattccacttggtcagagagccacgtcaccaccacctcaacccgcacctgggtcctgccgacctacaacaaccacctgtacctgcggctcggctcgagcaacgccagcgacaccttcaacggattctccaccccctggggatactttgactttaaccgcttccactgccacttctcgccaagagactggcaaaggctcatcaacaaccactggggactgcgccccaaaagcatgcaagtccgcatcttcaacatccaagttaaggaggtcacgacgtctaacggggagacgaccgtatccaacaacctcaccagcacggtccagatctttgcggacagcacgtacgagctcccgtacgtgatggatgcaggtcaggagggcagcttgcctcctttccccaacgacgtgttcatggtgcctcagtacgggtactgcggactggtaaccggaggcagctctcaaaaccagacagacagaaatgccttctactgtctggagtactttcccagccagatgctgagaaccggaaacaactttgagatggtgtacaagtttgaaaacgtgcccttccactccatgtacgctcacagccagagcctggataggctgatgaacccgctgctggaccagtacctgtgggagctccagtctaccacctctggaggaactctcaaccagggcaattcagccaccaactttgccaagctgaccaaaacaaacttttctggctaccgcaaaaactggctcccggggcccatgatgaagcagcagagattctccaagactgccagtcaaaactacaagattccccagggaagaaacaacagtctgctccattatgagaccagaactaccctcgacggaagatggagcaattttgccccgggaacggccatggcaaccgcagccaacgacgccaccgacttctctcaggcccagctcatctttgcggggcccaacatcaccggcaacaccaccacagatgccaataacctgatgttcacttcagaagatgaacttagggccaccaacccccgggacactgacctgtttggccacctggcaaccaaccagcaaaacgccaccaccgttcctaccgtagacgacgtggacggagtcggcgtgtacccgggaatggtgtggcaggacagagacatttactaccaagggcccatttgggccaaaattccacacacggatggacactttcacccgtctcctctcattggcggatttggactgaaaagcccgcctccacaaatattcatcaaaaacactcctgtacccgccaatcccgcaacgaccttctctccggccagaatcaacagcttcatcacccagtacagcaccggacaggtggctgtcaaaatagaatgggaaatccagaaggagcggtccaagagatggaacccagaggtccagttcacgtccaactacggagcacaggactcgcttctctgggctcccgacaacgccggagcctacaaagagcccagggccattggatcccgatacctcaccaaccacctctag

SEQ ID NO: 543 - DNA, 4694 bp, unidentified
  source 1..4694: mol_type = unassigned DNA; note = Bovine adeno-associated virus
gtggcactcccccccctgtcgcgttcgctcgttcgctggctcgattgggggggtggcagctcaaagagctgccagacgacggccctctgggccgtcgcccccccaatcgagccagcgaacgagcgaacgcgacaggggggggagtgccacactctctagcaagggggttttgtaggtggtgatgtcattgttgatgtcattatagttgtcacgcgatagttaatgattaacagtcatgtgatgtgtgttatccaataggatgaaagcgcgcgaatgagatctcgcgagacttccggggtataaaaggggtgagtgaacgagcccgccgccattctctgctctggactgctagaggaccctcgctgccatggctaccttctatgaagtcattgttcgcgttccatttgatgtggaagagcacctgcctggaatttctgacaactttgtagactgggtaactggtcaaatttgggagctgcctcccgagtcagatttgaatttgactctgattgagcagcctcagctgacggtggctgacagaattcgccgcgtgttcctgtacgagtggaacaaattttccaagcaggagagcaaattctttgtgcagtttgaaaagggatctgaatattttcatctgcacacgctcgtggagacctccggcatctcttctatggtccttggccgctacgtgagtcagattcgcgcccagctggtgaaggtggtgttccagaacattgagccgcggattaacgactgggtcgccatcaccaaggtaaagaagggcggagccaataaggtggtggattctgggtatattcccgcctacctgctgccgaaggtccaaccagagcttcagtgggcgtggactaacctcgaagagtataaattggccgccctcaatctggaggagcgcaaacggctcgtcgctcagtttcagcttgagtcctcgcagcgctcgcaagaggcatcttcccagagggacgtttcggctgacccggtcatcaagagcaagacttcccagaaatacatggcgctggtaagctggctggtggaacatggcatcacttccgagaagcagtggattcaggagaatcaggagagctacctgtccttcaactccacgggaaactctcggagccagattaaagccgcgcttgacaacgcgtcaaaaattatgagtctgaccaaatctgcctcagactatctcgtgggacagactgttccagaggacatttctgaaaacagaatctggcagatttttgatctcaacggctacgacccggcatacgcgggctctgttctctacggctggtgcactcgcgcctttggaaagaggaacaccgtctggctgtatggacccgcgaccaccggaaagaccaacatcgcggaagccatctctcacaccgtgcccttttatggctgtgtgaactggactaatgagaactttccctttaatgactgtgtggaaaaaatgttgatctggtgggaggagggaaagatgaccagcaaggtggtggaacccgccaaggccatcttgggggggtctagagtacgagtggatcaaaaatgtaaatcctctgtacaagtagactctaccccggtgattatcacctccaatactaacatgtgtgtggtggtggatgggaactccacgacctttgaacaccagcagccgctggaagaccgcatgttcagatttgaactcatgcggcggctcccgccagattttggcaagattaccaagcaggaagtcaaagacttttttgcttgggcaaaggtcaaccaggtgccggtgactcacgagtttatggttcccaagaaagtggcgggaactgagagggcggagacttctagaaaacgcccactggatgacgtcaccaataccaactataaaagtccggagaagcgggcccggctctcagttgttcctgagacgcctcgcagttcagacgtgcctgtagagcccgctcctctgcgacctctcaactggtcttccaggtatgaatgcagatgtgactatcatgctaaatttgactctgtaacgggggaatgtgacgagtgtgaatatttgaatcggggcaaaaatggctgtatctttcataatgctacacattgtcaaatttgtcacgctgttcctccatgggaaaaggaaaatgtgtcagattttaatgattttgatgactgtaataaagagcagtaaataaagtgagtagtcatgtcttttgttgaccaccctccagattggttggaatcgatcggcgacggctttcgtgaatttctcggccttgaggcgggtcccccgaaacccaaggccaatcaacagaagcaagataacgctcgaggtcttgtgcttcctgggtacaagtatcttggtcctgggaacggccttgataagggcgatcctgtcaattttgctgacgaggttgcccgagagcacgacctctcctaccagaaacagcttgaggcgggcgataacccttacctcaagtacaaccacgcggacgcagagtttcaggagaaactcgcttctgacacttcttttgggggaaaccttgggaaggctgttttccaggctaaaaagaggattctcgaacctcttggcctggttgagacgccggataaaacggcgcctgcggcaaaaaagaggcctctagagcagagtcctcaagagccagactcctcgagcggagttggcaagaaaggcaaacagcctgccagaaagagactcaactttgacgacgaacctggagccggagacgggcctcccccagaaggaccatcttccggagctatgtctactgagactgaaatgcgtgcagcagctggcggaaatggtggcgatgcgggacaaggtgccgagggagtgggtaatgcctccggtgattggcattgcgattccacttggtcagagagccacgtcaccaccacctcaacccgcacctgggtcctgccgacctacaacaaccacctgtacctgcggctcggctcgagcaacgccagcgacaccttcaacggattctccaccccctggggatactttgactttaaccgcttccactgccacttctcgccaagagactggcaaaggctcatcaacaaccactggggactgcgccccaaaagcatgcaagtccgcatcttcaacatccaagttaaggaggtcacgacgtctaacggggagacgaccgtatccaacaacctcaccagcacggtccagatctttgcggacagcacgtacgagctcccgtacgtgatggatgcaggtcaggagggcagcttgcctcctttccccaacgacgtgttcatggtgcctcagtacgggtactgcggactggtaaccggaggcagctctcaaaaccagacagacagaaatgccttctactgtctggagtactttcccagccagatgctgagaaccggaaacaactttgagatggtgtacaagtttgaaaacgtgcccttccactccatgtacgctcacagccagagcctggataggctgatgaacccgctgctggaccagtacctgtgggagctccagtctaccacctctggaggaactctcaaccagggcaattcagccaccaactttgccaagctgaccaaaacaaacttttctggctaccgcaaaaactggctcccggggcccatgatgaagcagcagagattctccaagactgccagtcaaaactacaagattccccagggaagaaacaacagtctgctccattatgagaccagaactaccctcgacggaagatggagcaattttgccccgggaacggccatggcaaccgcagccaacgacgccaccgacttctctcaggcccagctcatctttgcggggcccaacatcaccggcaacaccaccacagatgccaataacctgatgttcacttcagaagatgaacttagggccaccaacccccgggacactgacctgtttggccacctggcaaccaaccagcaaaacgccaccaccgttcctaccgtagacgacgtggacggagtcggcgtgtacccgggaatggtgtggcaggacagagacatttactaccaagggcccatttgggccaaaattccacacacggatggacactttcacccgtctcctctcattggcggatttggactgaaaagcccgcctccacaaatattcatcaaaaacactcctgtacccgccaatcccgcaacgaccttctctccggccagaatcaacagcttcatcacccagtacagcaccggacaggtggctgtcaaaatagaatgggaaatccagaaggagcggtccaagagatggaacccagaggtccagttcacgtccaactacggagcacaggactcgcttctctgggctcccgacaacgccggagcctacaaagagcccagggccattggatcccgatacctcaccaaccacctctagcccaattctgttgcataccctcaataaaccgtgtattcgtttcagtaaaatactgcctcttgtggtcattcggcgtacaacagcttacaacaacaacaaaacccccttgctagagagtgtggcactcccccccctgtcgcgttcgctcgttcgctggctcgattgggggggtggcagctcaaagagctgccagacgacggccctctgggccgtcgcccccccaatcgagccagcgaacgagcgaacgcgacaggggggggagtgccac

SEQ ID NO: 544 - protein, 390 aa, unidentified
  source 1..390: note = Bovine adeno-associated virus
MALVSWLVEHGITSEKQWIQENQESYLSFNSTGNSRSQIKAALDNASKIMSLTKSASDYLVGQTVPEDISENRIWQIFDLNGYDPAYAGSVLYGWCTRAFGKRNTVWLYGPATTGKTNIAEAISHTVPFYGCVNWTNENFPFNDCVEKMLIWWEEGKMTSKVVEPAKAILGGSRVRVDQKCKSSVQVDSTPVIITSNTNMCVVVDGNSTTFEHQQPLEDRMFRFELMRRLPPDFGKITKQEVKDFFAWAKVNQVPVTHEFMVPKKVAGTERAETSRKRPLDDVTNTNYKSPEKRARLSVVPETPRSSDVPVEPAPLRPLNWSSRYECRCDYHAKFDSVTGECDECEYLNRGKNGCIFHNATHCQICHAVPPWEKENVSDFNDFDDCNKEQ

SEQ ID NO: 545 - protein, 610 aa, unidentified
  source 1..610: note = Bovine adeno-associated virus
MATFYEVIVRVPFDVEEHLPGISDNFVDWVTGQIWELPPESDLNLTLIEQPQLTVADRIRRVFLYEWNKFSKQESKFFVQFEKGSEYFHLHTLVETSGISSMVLGRYVSQIRAQLVKVVFQNIEPRINDWVAITKVKKGGANKVVDSGYIPAYLLPKVQPELQWAWTNLEEYKLAALNLEERKRLVAQFQLESSQRSQEASSQRDVSADPVIKSKTSQKYMALVSWLVEHGITSEKQWIQENQESYLSFNSTGNSRSQIKAALDNASKIMSLTKSASDYLVGQTVPEDISENRIWQIFDLNGYDPAYAGSVLYGWCTRAFGKRNTVWLYGPATTGKTNIAEAISHTVPFYGCVNWTNENFPFNDCVEKMLIWWEEGKMTSKVVEPAKAILGGSRVRVDQKCKSSVQVDSTPVIITSNTNMCVVVDGNSTTFEHQQPLEDRMFRFELMRRLPPDFGKITKQEVKDFFAWAKVNQVPVTHEFMVPKKVAGTERAETSRKRPLDDVTNTNYKSPEKRARLSVVPETPRSSDVPVEPAPLRPLNWSSRYECRCDYHAKFDSVTGECDECEYLNRGKNGCIFHNATHCQICHAVPPWEKENVSDFNDFDDCNKEQ

SEQ ID NO: 546 - protein, 538 aa, synthetic construct
  REGION 1..538: note = Description of Artificial Sequence: Synthetic polypeptide
MRAAAGGNGGDAGQGAEGVGNASGDWHCDSTWSESHVTTTSTRTWVLPTYNNHLYLRLGSSNASDTFNGFSTPWGYFDFNRFHCHFSPRDWQRLINNHWGLRPKSMQVRIFNIQVKEVTTSNGETTVSNNLTSTVQIFADSTYELPYVMDAGQEGSLPPFPNDVFMVPQYGYCGLVTGGSSQNQTDRNAFYCLEYFPSQMLRTGNNFEMVYKFENVPFHSMYAHSQSLDRLMNPLLDQYLWELQSTTSGGTLNQGNSATNFAKLTKTNFSGYRKNWLPGPMMKQQRFSKTASQNYKIPQGRNNSLLHYETRTTLDGRWSNFAPGTAMATAANDATDFSQAQLIFAGPNITGNTTTDANNLMFTSEDELRATNPRDTDLFGHLATNQQNATTVPTVDDVDGVGVYPGMVWQDRDIYYQGPIWAKIPHTDGHFHPSPLIGGFGLKSPPPQIFIKNTPVPANPATTFSPARINSFITQYSTGQVAVKIEWEIQKERSKRWNPEVQFTSNYGAQDSLLWAPDNAGAYKEPRAIGSRYLTNHL

SEQ ID NO: 547 - protein, 736 aa, synthetic construct
  REGION 1..736: note = Description of Artificial Sequence: Synthetic polypeptide
MSFVDHPPDWLESIGDGFREFLGLEAGPPKPKANQQKQDNARGLVLPGYKYLGPGNGLDKGDPVNFADEVAREHDLSYQKQLEAGDNPYLKYNHADAEFQEKLASDTSFGGNLGKAVFQAKKRILEPLGLVETPDKTAPAAKKRPLEQSPQEPDSSSGVGKKGKQPARKRLNFDDEPGAGDGPPPEGPSSGAMSTETEMRAAAGGNGGDAGQGAEGVGNASGDWHCDSTWSESHVTTTSTRTWVLPTYNNHLYLRLGSSNASDTFNGFSTPWGYFDFNRFHCHFSPRDWQRLINNHWGLRPKSMQVRIFNIQVKEVTTSNGETTVSNNLTSTVHIFADSTYELPYVMDAGQEGSLPPFPNDVFMVPQYGYCGLVTGGSSQNQTDRNAFYCLEYFPSQMLRTGNNFEMVYKFENVPFHSMYAHSQSLDRLMNPLLDQYLWELQSTTSGGTLNQGNSATNFAKLTNKNFSGYRKNWLPGPMMKQQRFSKTASQNYKIPQGGNNSLLHYETRTTLDRRWSNFAPGTAMATAANDATDFSQAQLIFAGPNITGNTTTDANNLMFTSEDELRATNPRDTDLFGHLATNQQNATTVPTVDDVDGVGVYPGMVWQDRDIYYQGPIWAKIPHTDGHFHPSPLIGGFGLKSPPPQIFIKNTPVPANPATTFSPARINSFITQYSTGQVAVKIEWEIQKERSKRWNPEVQFTSNYGAQDSLLWAPDNAGAYKEPRAIGSRYLTNHL

SEQ ID NO: 548 - protein, 736 aa, synthetic construct
  REGION 1..736: note = Description of Artificial Sequence: Synthetic polypeptide
MSFVDHPPDWLESIGDGFREFLGLEAGPPKPKANQQKQDNARGLVLPGYKYLGPGNGLDKGDPVNFADEVAREHDLSYQKQLEAGDNPYLKYNHADAEFQEKLASDTSFGGNLGKAVFQAKKRILEPLGLVETPDKTAPAAKKRPLEQSPQEPDSSSGVGKKGKQPARKRLNFDDEPGAGDGPPPEGPSSGAMSTETEMRAAAGGNGGDAGQGAEGVGNASGDWHCDSTWSESHVTTTSTRTWVLPTYNNHLYLRLGSSNASDTFNGFSTPWGYFDFNRFHCHFSPRDWQRLINNHWGLRPKSMQVRIFNIQVKEVTTSNGETTVSNNLTSTVQIFADSTYELPYVMDAGQEGSLPPFPNDVFMVPQYGYCGLVTGGSSQNQTDRNAFYCLEYFPSQMLRTGNNFEMVYKFENVPFHSMYAHSQSLDRLMNPLLDQYLWELQSTTSGGTLNQGNSATNFAKLTKTNFSGYRKNWLPGPMMKQQRFSKTASQNYKIPQGRNNSLLHYETRTTLDGRWSNFAPGTAMATAANDATDFSQAQLIFAGPNITGNTTTDANNLMFTSEDELRATNPRDTDLFGHLATNQQNATTVPTVDDVDGVGVYPGMVWQDRDIYYQGPIWAKIPHTDGHFHPSPLIGGFGLKSPPPQIFIKNTPVPANPATTFSPARINSFITQYSTGQVAVKIEWEIQKERSKRWNPEVQFTSNYGAQDSLLWAPDNAGAYKEPRAIGSRYLTNHL

SEQ ID NO: 549 - protein, 736 aa, unidentified; identical to SEQ ID NO: 548
  source 1..736: note = Bovine adeno-associated virus

SEQ ID NO: 550 - protein, 600 aa, unidentified
  source 1..600: note = Bovine adeno-associated virus
TAPAAKKRPLEQSPQEPDSSSGVGKKGKQPARKRLNFDDEPGAGDGPPPEGPSSGAMSTETEMRAAAGGNGGDAGQGAEGVGNASGDWHCDSTWSESHVTTTSTRTWVLPTYNNHLYLRLGSSNASDTFNGFSTPWGYFDFNRFHCHFSPRDWQRLINNHWGLRPKSMQVRIFNIQVKEVTTSNGETTVSNNLTSTVQIFADSTYELPYVMDAGQEGSLPPFPNDVFMVPQYGYCGLVTGGSSQNQTDRNAFYCLEYFPSQMLRTGNNFEMVYKFENVPFHSMYAHSQSLDRLMNPLLDQYLWELQSTTSGGTLNQGNSATNFAKLTKTNFSGYRKNWLPGPMMKQQRFSKTASQNYKIPQGRNNSLLHYETRTTLDGRWSNFAPGTAMATAANDATDFSQAQLIFAGPNITGNTTTDANNLMFTSEDELRATNPRDTDLFGHLATNQQNATTVPTVDDVDGVGVYPGMVWQDRDIYYQGPIWAKIPHTDGHFHPSPLIGGFGLKSPPPQIFIKNTPVPANPATTFSPARINSFITQYSTGQVAVKIEWEIQKERSKRWNPEVQFTSNYGAQDSLLWAPDNAGAYKEPRAIGSRYLTNHL

SEQ ID NO: 551 - DNA, 2214 bp, synthetic construct
  misc_feature 1..2214: note = Description of Artificial Sequence: Synthetic polynucleotide
  source 1..2214: mol_type = other DNA
atggctgccgatggttatcttccagattggctcgaggacactctctctgaaggaataagacagtggtggaagctcaaacctggcccaccaccaccaaagcccgcagagcggcataaggacgacagcaggggtcttgtgcttcctgggtacaagtacctcggacccttcaacggactcgacaagggagagccggtcaacgaggcagacgccgcggccctcgagcacgacaaagcctacgaccggcagctcgacagcggagacaacccgtacctcaagtacaaccacgccgacgcggagtttcaggagcgccttaaagaagatacgtcttttgggggcaacctcgggcgagcagtcttccaggccaaaaagaggcttcttgaacctcttggtctggttgaggaagcggctaagacggctcctggaaagaagaggcctgtagagcagtctcctcaggaaccggactcctcctcgggcatcggcaagacaggccagcagcccgctaaaaagagactcaatttcggtcagactggcgacacagagtcagtcccagaccctcaaccaatcggagaacctcccgcagccccctcaggtgtgggatctcttacaatggcttcaggtggtggcgcaccagtggcagacaataacgaaggtgccgatggagtgggtagttcctcgggaaattggcattgcgattcccaatggctgggggacagagtcatcaccaccagcacccgaacctgggccctgcccacctacaacaatcacctctacaagcaaatctccaacgggacatcgggaggagccaccaacgacaacacctacttcggctacagcaccccctgggggtattttgactttaacagattccactgccacttttcaccacgtgactggcagcgactcatcaacaacaactggggattccggcccaagagactcagcttcaagctcttcaacatccaggtcaaggaggtcacgcagaatgaaggcaccaagaccatcgccaataaccttaccagcacggtccaggtcttcacggactcggagtaccagctgccgtacgttctcggctctgcccaccagggctgcctgcctccgttcccggcggacgtgttcatgattccccagtacggctacctaacactcaacaacggtagtcaggccgtgggacgctcctccttctactgcctggaatactttccttcgcagatgctgagaaccggcaacaacttccagtttacttacaccttcgaggacgtgcctttccacagcagctacgcccacagccagagcttggaccggctgatgaatcctctgattgaccagtacctgtactacttgtctcggactcaaacaacaggaggcacggcaaatacgcagactctgggcttcagccaaggtgggcctaatacaatggccaatcaggcaaagaactggctgccaggaccctgttaccgccaacaacgcgtctcaacgacaaccgggcaaaacaacaatagcaactttgcctggactgctgggaccaaataccatctgaatggaagaaattcattggctaatcctggcatcgctatggcaacacacaaagacgacaaggagcgtttttttcccagtaacgggatcctgatttttggcaaacaaaatgctgccagagacaatgcggattacagcgatgtcatgctcaccagcgaggaagaaatcaaaaccactaaccctgtggctacagaggaatacggtatcgtggcagataacttgcagcagcaaaacacggctcctcaaattggaactgtcaacagccagggggccttacccggtatggtttggcagaaccgggacgtgtacctgcagggtcccatctgggccaagattcctcacacggacggcaacttccacccgtctccgctgatgggcggctttggcctgaaacatcctccgcctcagatcctgatcaagaacacgcctgtacctgcggatcctccgaccaccttcaaccagtcaaagctgaactctttcatcacgcaatacagcaccggacaggtcagcgtggaaattgaatgggagctgcagaaggaaaacagcaagcgctggaaccccgagatccagtacacctccaactactacaaatctacaagtgtggactttgctgttaatacagaaggcgtgtactctgaaccccaccccattggcacccgttacctcacccgtcccctgtaa

SEQ ID NO: 552 - protein, 737 aa, synthetic construct
  REGION 1..737: note = Description of Artificial Sequence: Synthetic polypeptide
MAADGYLPDWLEDTLSEGIRQWWKLKPGPPPPKPAERHKDDSRGLVLPGYKYLGPFNGLDKGEPVNEADAAALEHDKAYDRQLDSGDNPYLKYNHADAEFQERLKEDTSFGGNLGRAVFQAKKRLLEPLGLVEEAAKTAPGKKRPVEQSPQEPDSSSGIGKTGQQPAKKRLNFGQTGDTESVPDPQPIGEPPAAPSGVGSLTMASGGGAPVADNNEGADGVGSSSGNWHCDSQWLGDRVITTSTRTWALPTYNNHLYKQISNGTSGGATNDNTYFGYSTPWGYFDFNRFHCHFSPRDWQRLINNNWGFRPKRLSFKLFNIQVKEVTQNEGTKTIANNLTSTVQVFTDSEYQLPYVLGSAHQGCLPPFPADVFMIPQYGYLTLNNGSQAVGRSSFYCLEYFPSQMLRTGNNFQFTYTFEDVPFHSSYAHSQSLDRLMNPLIDQYLYYLSRTQTTGGTANTQTLGFSQGGPNTMANQAKNWLPGPCYRQQRVSTTTGQNNNSNFAWTAGTKYHLNGRNSLANPGIAMATHKDDKERFFPSNGILIFGKQNAARDNADYSDVMLTSEEEIKTTNPVATEEYGIVADNLQQQNTAPQIGTVNSQGALPGMVWQNRDVYLQGPIWAKIPHTDGNFHPSPLMGGFGLKHPPPQILIKNTPVPADPPTTFNQSKLNSFITQYSTGQVSVEIEWELQKENSKRWNPEIQYTSNYYKSTSVDFAVNTEGVYSEPHPIGTRYLTRPL

SEQ ID NO: 553 - protein, 736 aa, synthetic construct
  REGION 1..736: note = Description of Artificial Sequence: Synthetic polypeptide
MAADGYLPDWLEDNLSEGIREWWDLKPGAPKPKANQQKQDDGRGLVLPGYKYLGPFNGLDKGEPVNAADAAALEHDKAYDQQLKAGDNPYLRYNHADAEFQERLQEDTSFGGNLGRAVFQAKKRVLEPLGLVEEGAKTAPGKKRPVEQSPQEPDSSSGIGKTGQQPAKKRLNFGQTGDTESVPDPQPIGEPPAAPSGVGSLTMASGGGAPVADNNEGADGVGSSSGNWHCDSQWLGDRVITTSTRTWALPTYNNHLYKQISSASTGASNDNHYFGYSTPWGYFDFNRFHCHFSPRDWQRLINNNWGFRPKRLNFKLFNIQVKEVTDNNGVKTIANNLTSTVQVFTDSDYQLPYVLGSAHQGCLPPFPADVFMIPQYGYLTLNNGSQAVGRSSFYCLEYFPSQMLRTGNNFQFTYTFEDVPFHSSYAHSQSLDRLMNPLIDQYLYYLSRTQTTGGTANTQTLGFSQGGPNTMANQAKNWLPGPCYRQQRVSTTTGQNNNSNFAWTAGTKYHLNGRNSLANPGIAMATHKDDKERFFPSNGILIFGKQNAARDNADYSDVMLTSEEEIKTTNPVATEEYGIVADNLQQQNTAPQIGTVNSQGALPGMVWQNRDVYLQGPIWAKIPHTDGNFHPSPLMGGFGLKHPPPQILIKNTPVPADPPTTFNQSKLNSFITQYSTGQVSVEIEWELQKENSKRWNPEIQYTSNYYKSTSVDFAVNTEGVYSEPHPIGTRYLTRPL

SEQ ID NO: 554 - protein, 736 aa, synthetic construct
  REGION 1..736: note = Description of Artificial Sequence: Synthetic polypeptide
MAADGYLPDWLEDTLSEGIRQWWKLKPGPPPPKPAERHKDDSRGLVLPGYKYLGPFNGLDKGEPVNEADAAALEHDKAYDRQLDSGDNPYLKYNHADAEFQERLQGDTSFGGNLGRAVFQAKKRVLEPLGLVEEGAKTAPGKKRPVEQSPQEPDSSSGIGETGQQPAKKRLNFGQTGDSESVPDPQPLGEPPATPAAVGPTTMASGGGAPMADNNEGADGVGSSSGNWHCDSQWLGDRVITTSTRTWALPTYNNHLYKQISSASTGASNDNHYFGYSTPWGYFDFNRFHCHFSPRDWQRLINNNWGFRPKRLSFKLFNIQVKEVTDNNGVKTIANNLTSTVQVFTDSEYQLPYVLGSAHQGCLPPFPADVFMIPQYGYLTLNNGSQAVGRSSFYCLEYFPSQMLRTGNNFTFSYTFEDVPFHSSYAHSQSLDRLMNPLIDQYLYYLSRTQTTGGTANTQTLGFSQGGPNTMANQAKNWLPGPCYRQQRVSTTTGQNNNSNFAWTAGTKYHLNGRNSLANPGIAMATHKDDKERFFPSNGILIFGKQNAARDNADYSDVMLTSEEEIKTTNPVATEEYGIVADNLQQQNTAPQIGTVNSQGALPGMVWQNRDVYLQGPIWAKIPHTDGNFHPSPLMGGFGLKHPPPQILIKNTPVPADPPTTFNQSKLNSFITQYSTGQVSVEIEWELQKENSKRWNPEIQYTSNYYKSTSVDFAVNTEGVYSEPHPIGTRYLTRPL

SEQ ID NO: 555 - DNA, 2181 bp, synthetic construct
  misc_feature 1..2181: note = Description of Artificial Sequence: Synthetic polynucleotide
  source 1..2181: mol_type = other DNA
atgtcttttgttgatcaccctccagattggttggaagaagttggtgaaggtcttcgcgagtttttgggccttgaagcgggcccaccgaaaccaaaacccaatcagcagcatcaagatcaagcccgtggtcttgtgctgcctggttataactatctcggacccggaaacggtctcgatcgaggagagcctgtcaacagggcagacgaggtcgcgcgagagcacgacatctcgtacaacgagcagcttgaggcgggagacaacccctacctcaagtacaaccacgcggacgccgagtttcaggagaagctcgccgacgacacatccttcgggggaaacctcggaaaggcagtctttcaggccaagaaaagggttctcgaaccttttggcctggttgaagagggtgctaagacggcccctaccggaaagcggatagacgaccactttccaaaaagaaagaaggctcggaccgaagaggactccaagccttccacctcgtcagacgccgaagctggacccagcggatcccagcagctgcaaatcccagcacaaccagcctcaagtttgggagctgatacaatgtctgcgggaggtggcggcccattgggcgacaataaccaaggtgccgatggagtgggcaatgcctcgggagattggcattgcgattccacgtggatgggggacagagtcgtcaccaagtccacccgcacctgggtgctgcccagctacaacaaccaccagtaccgagagatcaaaagcggctccgtcgacggaagcaacgccaacgcctactttggatacagcaccccctgggggtactttgactttaaccgcttccacagccactggagcccccgagactggcaaagactcatcaacaactattggggcttcagaccccggtctctcagagtcaaaatcttcaacatccaagtcaaagaggtcacggtgcaggactccaccaccaccatcgccaacaacctcacctccaccgtccaagtgtttacggacgacgactaccaactcccgtacgtcgtcggcaacgggaccgagggatgcctgccggccttccccccgcaggtctttacgctgccgcagtacggctacgcgacgctgaaccgagacaacggagacaacccgacagagcggagcagcttcttttgcctagagtactttcccagcaagatgctgaggacgggcaacaactttgagtttacctacagctttgaagaggtgcccttccactgcagcttcgccccgagccagaacctctttaagctggccaacccgctggtggaccagtacctgtaccgcttcgtgagcacctcggccacgggcgccatccagttccaaaagaacctggcgggcagatacgccaacacctacaaaaactggttcccggggcccatgggccgaacccagggctggaacacgagctctggggtcagcagcaccaacagagtcagcgtcaacaacttttccgtctcaaaccggatgaacctggagggggccagctaccaagtgaacccccagcccaacgggatgacaaacacgctccaaggcagcaaccgctacgcgctggaaaacaccatgatcttcaacgctcaaaacgccacgccgggaactacctcggtgtacccagaggacaatctactgctgaccagcgagagcgagactcagcccgtcaaccgggtggcttacaacacgggcggtcagatggccaccaacgcccagaacgccaccacggctcccacggtcgggacctacaacctccaggaagtgcttcctggcagcgtatggatggagagggacgtgtacctccaaggacccatctgggccaagatcccagagacgggggcgcactttcacccctctccggccatgggcggattcggactcaaacacccgccgcccatgatgctcatcaaaaacacgccggtgcccggcaacatcaccagcttctcggacgtgcccgtcagcagcttcatcacccagtacagcaccgggcaggtcaccgtggagatggaatgggagctcaaaaaggaaaactccaagaggtggaacccagagatccagtacaccaacaactacaacgacccccagtttgtggactttgctccagacggctccggcgaatacagaaccaccagagccatcggaacccgatacctcacccgacccctt

SEQ ID NO: 556 - protein, 726 aa, synthetic construct
  REGION 1..726: note = Description of Artificial Sequence: Synthetic polypeptide
MSFVDHPPDWLEEVGEGLREFLGLEAGPPKPKPNQQHQDQARGLVLPGYNYLGPGNGLDRGEPVNRADEVAREHDISYNEQLEAGDNPYLKYNHADAEFQEKLADDTSFGGNLGKAVFQAKKRVLEPFGLVEEGAKTAPTGKRIDDHFPKRKKARTEEDSKPSTSSDAEAGPSGSQQLQIPAQPASSLGADTMSAGGGGPLGDNNQGADGVGNASGDWHCDSTWMGDRVVTKSTRTWVLPSYNNHQYREIKSGSVDGSNANAYFGYSTPWGYFDFNRFHSHWSPRDWQRLINNYWGFRPRSLRVKIFNIQVKEVTVQDSTTTIANNLTSTVQVFTDDDYQLPYVVGNGTEGCLPAFPPQVFTLPQYGYATLNRDNGDNPTERSSFFCLEYFPSKMLRTGNNFEFTYSFEEVPFHCSFAPSQNLFKLANPLVDQYLYRFVSTSATGAIQFQKNLAGRYANTYKNWFPGPMGRTQGWNTSSGSSTNRVSVNNFSVSNRMNLEGASYQVNPQPNGMTNTLQGSNRYALENTMIFNAQNATPGTTSVYPEDNLLLTSESETQPVNRVAYNTGGQMATNAQNATTAPTVGTYNLQEVLPGSVWMERDVYLQGPIWAKIPETGAHFHPSPAMGGFGLKHPPPMMLIKNTPVPGNITSFSDVPVSSFITQYSTGQVTVEMEWELKKENSKRWNPEIQYTNNYNDPQFVDFAPDGSGEYRTTRAIGTRYLTRPL

SEQ ID NO: 557 - protein, 735 aa, synthetic construct
  REGION 1..735: note = Description of Artificial Sequence: Synthetic polypeptide
MAADGYLPDWLEDTLSEGIRQWWKLKPGPPPPKPAERHKDDSRGLVLPGYKYLGPFNGLDKGEPVNEADAAALEHDKAYDRQLDSGDNPYLKYNHADAEFQERLKEDTSFGGNLGRAVFQAKKRILEPLGLVEEPVKTAPGKKRPVEHSPAEPDSSSGTGKSGQQPARKRLNFGQTGDADSVPDPQPLGQPPAAPSGLGTNTMASGSGAPMADNNEGADGVGNSSGNWHCDSTWMGDRVITTSTRTWALPTYNNHLYKQISSQSGASNDNHYFGYSTPWGYFDFNRFHCHFSPRDWQRLINNNWGFRPKRLSFKLFNIQVKEVTQNDGTTTIANNLTSTVQVFTDSEYQLPYVLGSAHQGCLPPFPADVFMVPQYGYLTLNNGSQAVGRSSFYCLEYFPSQMLRTGNNFTFSYTFEDVPFHSSYAHSQSLDRLMNPLIDQYLYYLSRTNTPSGTTTMSRLQFSQAGASDIRDQSRNWLPGPCYRQQRVSKTAADNNNSDYSWTGATKYHLNGRDSLVNPGPAMASHKDDEEKYFPQSGVLIFGKQDSGKTNVDIEKVMITDEEEIRTTNPVATEQYGSVSTNLQSGNTQAATSDVNTQGVLPGMVWQDRDVYLQGPIWAKIPHTDGHFHPSPLMGGFGLKHPPPQILIKNTPVPANPSTTFSAAKFASFITQYSTGQVSVEIEWELQKENSKRWNPEIQYTSNYNKSVNVDFTVDTNGVYSEPRPIGTRYLTRNL

SEQ ID NO: 558 - DNA, 1797 bp, synthetic construct
  misc_feature 1..1797: note = Description of Artificial Sequence: Synthetic polynucleotide
  source 1..1797: mol_type = other DNA
acggctccgaccggagacaagcggaaaggcgaagacgaacctcgtttgcccgacacttcttcacagactcccaagaaaaacaagaagcctcgcaaggaaagaccttccggcggggcagaagatccgggcgaaggcacctcttccaacgctggagcagcagcacccgcctctagtgtgggatcatctatcatggctgaaggaggtggcggcccagtgggcgatgcaggccagggtgccgatggagtgggcaattcctccggaaattggcattgcgattcccaatggctggaaaacggagtcgtcactcgaaccacccgaacctgggtcttgcccagctacaacaaccacctgtacaaacgaatccaaggacccagcggaggcgacaacaacaacaaattctttggattcagcaccccctggggatactttgactacaatcgattccactgccacttttccccgcgagactggcaacgactcatcaacaacaactggggcatccgtcccaaagcgatgcgctttagactctttaacatccaggttaaagaggtcacggtccaagacttcaacaccaccatcggcaacaacctcaccagtacggtccaggtctttgcggacaaggactaccaactgccgtacgtcctcggatcggctaccgaaggcaccttcccgccgttcccagcggatatctacacgatcccgcagtacgggtactgcacgctaaactacaacaacgaggcggtggatcgttcggccttctactgtctggactactttccctcagacatgctgcggacaggaaataactttgagtttacttacaccttcgaggacgttcctttccatagcatgtttgcccacaaccagacgctagaccggctgatgaatcccctcgtggatcagtacctctgggctttcagctccgtcagccaagcaggctcatctggacgagctcttcattactcgcgggcgactaaaaccaacatggcggctcaatataggaactggttacctgggcctttcttccgtgatcagcaaatctttacgggcgctagcaacatcactaaaaataacgtctttagcgtttgggaaaaaggcaagcaatgggaactcgacaatcggaccaacctaatgcagcccggtcctgcggcagcgaccacctttagcggagaacctgaccgtcaagccatgcaaaacacgctggcttttagcaggaccgtctacgatcaaacgaccgccacgaccgatcgtaaccagatactcatcaccaacgaagacgaaatcagacccaccaactcggtcggtatcgacgcgtggggagcagttcccaccaacaaccagtcgatcgtgacccccggcactcgcgcggccgtcaacaatcaaggggcgcttcccgggatggtgtggcaaaacagagacatttaccctacagggacccatttggccaaaattcccgacactgacaatcacttccatccgtccccgcttattgggcggtttggctgcaagcatccccctccccagattttcattaaaaacacacccgtccctgccaacccttcggaaacgttccagacggccaaagtggcctccttcatcaaccagtactcgaccggacagtgcaccgtcgaaatcttttgggaactcaagaaggaaacctccaagcgctggaaccccgaaatccagttcacctccaactttggcaacgcggccgacatccagtttgccgtctccgacacgggatcctattccgaacctcgtcccatcggtacccgttaccttaccaaacctctgtaa

SEQ ID NO: 559 - DNA, 1989 bp, synthetic construct
  misc_feature 1..1989: note = Description of Artificial Sequence: Synthetic polynucleotide
  source 1..1989: mol_type = other DNA
atgaggtcgtactacgaggtcatcgttcagctgcccaacgacgtcgagagtcaggtacctggaatctccgattcgttcgtcaactggattacgtcgcgagaatggacgttgcctgaggacgccgattgggatttggaccaggtcgatcaagttcaactgacgctcggcgacaaaatccaacgggagattcgaactcattgggggacgatggccaaagaaccggactttcactattttatccaactggaacaaggtgaggtgttctttcatttacacgtcctgctggaaacgtgttccgtaaagccgatggtactcggaagatatatccgacatattcaacaaaaaattgtgagtaaagtctactgcgccacgagcctacgatggaaggatggatgcgtggtgaccaagaccaaaaatttcgggggcgcgaacaaggtccgggccgagtcgtatattcccgcctacctgatcccgaaacagcaaccggaagtgcagtgggcgtggactaacgtgcccgagtatataaaagcgtgcttgcaccgagaactgcgtgccagtctcgcgcgacttcacttcgaggaggcgggcgtctcgcaatccaaggaaaatctcgcgagaactgcagacggcgctcccgtgatgccgacccgcgtcagcaaacgctacatggagctcgtggattggctcgtggagaaggggatcaccaccgagaaggaatggctgctggaaaacagagaaagctttcggagctttcaggcctcgagcaactcggcgcgtcagatcaagacggccctgcaaggcgccattcaggagatgcttctgaccaagacggcggaggactacctcgtcggaaaggatcccgtctcggacgacgacatccgtcagaaccgcatctacaagattctggaactgaaccactacgacccagcgtacgtggggagtattttggtcgggtggtgccagaagaaatggggcaagcgaaacacgctgtggctgttcggacatgcgaccaccggcaagaccaacatcgcggaggctattgcccatgctgtgccgttctatggatgcgttaactggaccaacgagaactttccgttcaacgactgcgtcgaaaaaatgattatctggtgggaggagggcaaaatgaccgccaaagtggtggaaacagccaaggcgattctgggaggatctcgggtgagagtggaccaaaaatgcaaagcttcggttccgatcgaaccgacgccggtcattattaccagtaacaccaacatgtgttatgtcatcgacgggaacacgaccacgttcgagcataagcagccgttggaggacaggatgtttaagctcgaattgctgactcggttgcctgatgactttggtaaggtgaccaaacaggaggtgcgtcaattcttcaggtggtctcaggatcacctgacccctgtgatcccagaattcctagtgcggaaggcggagtctcgcaaaagacccgccccttccggggaaggctatataagcccgacaaagcggcccgcgctcgcagagcagcagcaggcgtcggagagcgcggacccggttcccaccaggtatcgtatcaaatgctcgaaacattgcggtatggataaaatgttgtttccttgccaaatttgtgaatcgatgaacagagatattaatatttgtgctattcataaaacgaccgactgtaaagagtgtttccccgactacggggataaagatgatgtagaactacccccctgtacagaacacaacgtgtctcgttgttatcaatgtcattcgggcgaattgtatcgcgtgacttcggactctgacgagaaacctgcccccgagagtgatgaaggcaccgagccatcctatgctccctgcacgattcaccacctgatgggcaagagtcacgggttagtcacttgcgcggcgtgtcggttgaaaaatagtacgttgcatgatgacttggatgacggtgatctcgaacaataa

SEQ ID NO: 560 - DNA, 1626 bp, synthetic construct
  misc_feature 1..1626: note = Description of Artificial Sequence: Synthetic polynucleotide
  source 1..1626: mol_type = other DNA
atgaggtcgtactacgaggtcatcgttcagctgcccaacgacgtcgagagtcaggtacctggaatctccgattcgttcgtcaactggattacgtcgcgagaatggacgttgcctgaggacgccgattgggatttggaccaggtcgatcaagttcaactgacgctcggcgacaaaatccaacgggagattcgaactcattgggggacgatggccaaagaaccggactttcactattttatccaactggaacaaggtgaggtgttctttcatttacacgtcctgctggaaacgtgttccgtaaagccgatggtactcggaagatatatccgacatattcaacaaaaaattgtgagtaaagtctactgcgccacgagcctacgatggaaggatggatgcgtggtgaccaagaccaaaaatttcgggggcgcgaacaaggtccgggccgagtcgtatattcccgcctacctgatcccgaaacagcaaccggaagtgcagtgggcgtggactaacgtgcccgagtatataaaagcgtgcttgcaccgagaactgcgtgccagtctcgcgcgacttcacttcgaggaggcgggcgtctcgcaatccaaggaaaatctcgcgagaactgcagacggcgctcccgtgatgccgacccgcgtcagcaaacgctacatggagctcgtggattggctcgtggagaaggggatcaccaccgagaaggaatggctgctggaaaacagagaaagctttcggagctttcaggcctcgagcaactcggcgcgtcagatcaagacggccctgcaaggcgccattcaggagatgcttctgaccaagacggcggaggactacctcgtcggaaaggatcccgtctcggacgacgacatccgtcagaaccgcatctacaagattctggaactgaaccactacgacccagcgtacgtggggagtattttggtcgggtggtgccagaagaaatggggcaagcgaaacacgctgtggctgttcggacatgcgaccaccggcaagaccaacatcgcggaggctattgcccatgctgtgccgttctatggatgcgttaactggaccaacgagaactttccgttcaacgactgcgtcgaaaaaatgattatctggtgggaggagggcaaaatgaccgccaaagtggtggaaacagccaaggcgattctgggaggatctcgggtgagagtggaccaaaaatgcaaagcttcggttccgatcgaaccgacgccggtcattattaccagtaacaccaacatgtgttatgtcatcgacgggaacacgaccacgttcgagcataagcagccgttggaggacaggatgtttaagctcgaattgctgactcggttgcctgatgactttggtaaggtgaccaaacaggaggtgcgtcaattcttcaggtggtctcaggatcacctgacccctgtgatcccagaattcctagtgcggaaggcggagtctcgcaaaagacccgccccttccggggaaggctatataagcccgacaaagcggcccgcgctcgcagagcagcagcaggcgtcggagagcgcggacccggttcccaccagattggttggagcggttggtcaaaaagggagtgaatgctgcagctga

SEQ ID NO: 561 - DNA, 1323 bp, synthetic construct
  misc_feature 1..1323: note = Description of Artificial Sequence: Synthetic polynucleotide
  source 1..1323: mol_type = other DNA
atggagctcgtggattggctcgtggagaaggggatcaccaccgagaaggaatggctgctggaaaacagagaaagctttcggagctttcaggcctcgagcaactcggcgcgtcagatcaagacggccctgcaaggcgccattcaggagatgcttctgaccaagacggcggaggactacctcgtcggaaaggatcccgtctcggacgacgacatccgtcagaaccgcatctacaagattctggaactgaaccactacgacccagcgtacgtggggagtattttggtcgggtggtgccagaagaaatggggcaagcgaaacacgctgtggctgttcggacatgcgaccaccggcaagaccaacatcgcggaggctattgcccatgctgtgccgttctatggatgcgttaactggaccaacgagaactttccgttcaacgactgcgtcgaaaaaatgattatctggtgggaggagggcaaaatgaccgccaaagtggtggaaacagccaaggcgattctgggaggatctcgggtgagagtggaccaaaaatgcaaagcttcggttccgatcgaaccgacgccggtcattattaccagtaacaccaacatgtgttatgtcatcgacgggaacacgaccacgttcgagcataagcagccgttggaggacaggatgtttaagctcgaattgctgactcggttgcctgatgactttggtaaggtgaccaaacaggaggtgcgtcaattcttcaggtggtctcaggatcacctgacccctgtgatcccagaattcctagtgcggaaggcggagtctcgcaaaagacccgccccttccggggaaggctatataagcccgacaaagcggcccgcgctcgcagagcagcagcaggcgtcggagagcgcggacccggttcccaccaggtatcgtatcaaatgctcgaaacattgcggtatggataaaatgttgtttccttgccaaatttgtgaatcgatgaacagagatattaatatttgtgctattcataaaacgaccgactgtaaagagtgtttccccgactacggggataaagatgatgtagaactacccccctgtacagaacacaacgtgtctcgttgttatcaatgtcattcgggcgaattgtatcgcgtgacttcggactctgacgagaaacctgcccccgagagtgatgaaggcaccgagccatcctatgctccctgcacgattcaccacctgatgggcaagagtcacgggttagtcacttgcgcggcgtgtcggttgaaaaatagtacgttgcatgatgacttggatgacggtgatctcgaacaataa

SEQ ID NO: 562 - DNA, 960 bp, synthetic construct
  misc_feature 1..960: note = Description of Artificial Sequence: Synthetic polynucleotide
  source 1..960: mol_type = other DNA
atggagctcgtggattggctcgtggagaaggggatcaccaccgagaaggaatggctgctggaaaacagagaaagctttcggagctttcaggcctcgagcaactcggcgcgtcagatcaagacggccctgcaaggcgccattcaggagatgcttctgaccaagacggcggaggactacctcgtcggaaaggatcccgtctcggacgacgacatccgtcagaaccgcatctacaagattctggaactgaaccactacgacccagcgtacgtggggagtattttggtcgggtggtgccagaagaaatggggcaagcgaaacacgctgtggctgttcggacatgcgaccaccggcaagaccaacatcgcggaggctattgcccatgctgtgccgttctatggatgcgttaactggaccaacgagaactttccgttcaacgactgcgtcgaaaaaatgattatctggtgggaggagggcaaaatgaccgccaaagtggtggaaacagccaaggcgattctgggaggatctcgggtgagagtggaccaaaaatgcaaagcttcggttccgatcgaaccgacgccggtcattattaccagtaacaccaacatgtgttatgtcatcgacgggaacacgaccacgttcgagcataagcagccgttggaggacaggatgtttaagctcgaattgctgactcggttgcctgatgactttggtaaggtgaccaaacaggaggtgcgtcaattcttcaggtggtctcaggatcacctgacccctgtgatcccagaattcctagtgcggaaggcggagtctcgcaaaagacccgccccttccggggaaggctatataagcccgacaaagcggcccgcgctcgcagagcagcagcaggcgtcggagagcgcggacccggttcccaccagattggttggagcggttggtcaaaaagggagtgaatgctgcagctga

SEQ ID NO: 563 - DNA, 1608 bp, synthetic construct
  misc_feature 1..1608: note = Description of Artificial Sequence: Synthetic polynucleotide
  source 1..1608: mol_type = other DNA
atggctgaaggaggtggcggcccagtgggcgatgcaggccagggtgccgatggagtgggcaattcctccggaaattggcattgcgattcccaatggctggaaaacggagtcgtcactcgaaccacccgaacctgggtcttgcccagctacaacaaccacctgtacaaacgaatccaaggacccagcggaggcgacaacaacaacaaattctttggattcagcaccccctggggatactttgactacaatcgattccactgccacttttccccgcgagactggcaacgactcatcaacaacaactggggcatccgtcccaaagcgatgcgctttagactctttaacatccaggttaaagaggtcacggtccaagacttcaacaccaccatcggcaacaacctcaccagtacggtccaggtctttgcggacaaggactaccaactgccgtacgtcctcggatcggctaccgaaggcaccttcccgccgttcccagcggatatctacacgatcccgcagtacgggtactgcacgctaaactacaacaacgaggcggtggatcgttcggccttctactgtctggactactttccctcagacatgctgcggacaggaaataactttgagtttacttacaccttcgaggacgttcctttccatagcatgtttgcccacaaccagacgctagaccggctgatgaatcccctcgtggatcagtacctctgggctttcagctccgtcagccaagcaggctcatctggacgagctcttcattactcgcgggcgactaaaaccaacatggcggctcaatataggaactggttacctgggcctttcttccgtgatcagcaaatctttacgggcgctagcaacatcactaaaaataacgtctttagcgtttgggaaaaaggcaagcaatgggaactcgacaatcggaccaacctaatgcagcccggtcctgcggcagcgaccacctttagcggagaacctgaccgtcaagccatgcaaaacacgctggcttttagcaggaccgtctacgatcaaacgaccgccacgaccgatcgtaaccagatactcatcaccaacgaagacgaaatcagacccaccaactcggtcggtatcgacgcgtggggagcagttcccaccaacaaccagtcgatcgtgacccccggcactcgcgcggccgtcaacaatcaaggggcgcttcccgggatggtgtggcaaaacagagacatttaccctacagggacccatttggccaaaattcccgacactgacaatcacttccatccgtccccgcttattgggcggtttggctgcaagcatccccctccccagattttcattaaaaacacacccgtccctgccaacccttcggaaacgttccagacggccaaagtggcctccttcatcaaccagtactcgaccggacagtgcaccgtcgaaatcttttgggaactcaagaaggaaacctccaagcgctggaaccccgaaatccagttcacctccaactttggcaacgcggccgacatccagtttgccgtctccgacacgggatcctattccgaacctcgtcccatcggtacccgttaccttaccaaacctctgtaa

SEQ ID NO: 564 - DNA, 2232 bp, synthetic construct
  misc_feature 1..2232: note = Description of Artificial Sequence: Synthetic polynucleotide
  source 1..2232: mol_type = other DNA
atgtctctcatttctgatgcgattccagattggttggagcggttggtcaaaaagggagtgaatgctgcagctgatttctaccatttggaaagcggtcctcctcgtcctaaggcaaatcagcaaactcaagaatctcttgaaaaggacgattcgagaggtctcgtgttcccaggctacaattatctaggccctttcaacggtctagataaaggagaacccgtcaacgaggcagacgctgccgccttagaacacgacaaggcttacgacctcgaaatcaaggacgggcacaacccgtactttgagtacaacgaggccgacagacgtttccaggaacgtctcaaagacgatacctcctttggaggcaatttaggtaaagccatcttccaggccaaaaagagggttctcgaaccctttggtctggtggaagactcaaagacggctccgaccggagacaagcggaaaggcgaagacgaacctcgtttgcccgacacttcttcacagactcccaagaaaaacaagaagcctcgcaaggaaagaccttccggcggggcagaagatccgggcgaaggcacctcttccaacgctggagcagcagcacccgcctctagtgtgggatcatctatcatggctgaaggaggtggcggcccagtgggcgatgcaggccagggtgccgatggagtgggcaattcctccggaaattggcattgcgattcccaatggctggaaaacggagtcgtcactcgaaccacccgaacctgggtcttgcccagctacaacaaccacctgtacaaacgaatccaaggacccagcggaggcgacaacaacaacaaattctttggattcagcaccccctggggatactttgactacaatcgattccactgccacttttccccgcgagactggcaacgactcatcaacaacaactggggcatccgtcccaaagcgatgcgctttagactctttaacatccaggttaaagaggtcacggtccaagacttcaacaccaccatcggcaacaacctcaccagtacggtccaggtctttgcggacaaggactaccaactgccgtacgtcctcggatcggctaccgaaggcaccttcccgccgttcccagcggatatctacacgatcccgcagtacgggtactgcacgctaaactacaacaacgaggcggtggatcgttcggccttctactgtctggactactttccctcagacatgctgcggacaggaaataactttgagtttacttacaccttcgaggacgttcctttccatagcatgtttgcccacaaccagacgctagaccggctgatgaatcccctcgtggatcagtacctctgggctttcagctccgtcagccaagcaggctcatctggacgagctcttcattactcgcgggcgactaaaaccaacatggcggctcaatataggaactggttacctgggcctttcttccgtgatcagcaaatctttacgggcgctagcaacatcactaaaaataacgtctttagcgtttgggaaaaaggcaagcaatgggaactcgacaatcggaccaacctaatgcagcccggtcctgcggcagcgaccacctttagcggagaacctgaccgtcaagccatgcaaaacacgctggcttttagcaggaccgtctacgatcaaacgaccgccacgaccgatcgtaaccagatactcatcaccaacgaagacgaaatcagacccaccaactcggtcggtatcgacgcgtggggagcagttcccaccaacaaccagtcgatcgtgacccccggcactcgcgcggccgtcaacaatcaaggggcgcttcccgggatggtgtggcaaaacagagacatttaccctacagggacccatttggccaaaattcccgacactgacaatcacttccatccgtccccgcttattgggcggtttggctgcaagcatccccctccccagattttcattaaaaacacacccgtccctgccaacccttcggaaacgttccagacggccaaagtggcctccttcatcaaccagtactcgaccggacagtgcaccgtcgaaatcttttgggaactcaagaaggaaacctccaagcgctggaaccccgaaatccagttcacctccaactttggcaacgcggccgacatccagtttgccgtctccgacacgggatcctattccgaacctcgtcccatcggtacccgttaccttaccaaacctctgtaa

SEQ ID NO: 565 - protein, 535 aa, synthetic construct
  REGION 1..535: note = Description of Artificial Sequence: Synthetic polypeptide
MAEGGGGPVGDAGQGADGVGNSSGNWHCDSQWLENGVVTRTTRTWVLPSYNNHLYKRIQGPSGGDNNNKFFGFSTPWGYFDYNRFHCHFSPRDWQRLINNNWGIRPKAMRFRLFNIQVKEVTVQDFNTTIGNNLTSTVQVFADKDYQLPYVLGSATEGTFPPFPADIYTIPQYGYCTLNYNNEAVDRSAFYCLDYFPSDMLRTGNNFEFTYTFEDVPFHSMFAHNQTLDRLMNPLVDQYLWAFSSVSQAGSSGRALHYSRATKTNMAAQYRNWLPGPFFRDQQIFTGASNITKNNVFSVWEKGKQWELDNRTNLMQPGPAAATTFSGEPDRQAMQNTLAFSRTVYDQTTATTDRNQILITNEDEIRPTNSVGIDAWGAVPTNNQSIVTPGTRAAVNNQGALPGMVWQNRDIYPTGTHLAKIPDTDNHFHPSPLIGRFGCKHPPPQIFIKNTPVPANPSETFQTAKVASFINQYSTGQCTVEIFWELKKETSKRWNPEIQFTSNFGNAADIQFAVSDTGSYSEPRPIGTRYLTKPL

SEQ ID NO: 566 - protein, 440 aa, synthetic construct
  REGION 1..440: note = Description of Artificial Sequence: Synthetic polypeptide
MELVDWLVEKGITTEKEWLLENRESFRSFQASSNSARQIKTALQGAIQEMLLTKTAEDYLVGKDPVSDDDIRQNRIYKILELNHYDPAYVGSILVGWCQKKWGKRNTLWLFGHATTGKTNIAEAIAHAVPFYGCVNWTNENFPFNDCVEKMIIWWEEGKMTAKVVETAKAILGGSRVRVDQKCKASVPIEPTPVIITSNTNMCYVIDGNTTTFEHKQPLEDRMFKLELLTRLPDDFGKVTKQEVRQFFRWSQDHLTPVIPEFLVRKAESRKRPAPSGEGYISPTKRPALAEQQQASESADPVPTRYRIKCSKHCGMDKMLFPCQICESMNRDINICAIHKTTDCKECFPDYGDKDDVELPPCTEHNVSRCYQCHSGELYRVTSDSDEKPAPESDEGTEPSYAPCTIHHLMGKSHGLVTCAACRLKNSTLHDDLDDGDLEQ

SEQ ID NO: 567 - protein, 319 aa, synthetic construct
  REGION 1..319: note = Description of Artificial Sequence: Synthetic polypeptide
MELVDWLVEKGITTEKEWLLENRESFRSFQASSNSARQIKTALQGAIQEMLLTKTAEDYLVGKDPVSDDDIRQNRIYKILELNHYDPAYVGSILVGWCQKKWGKRNTLWLFGHATTGKTNIAEAIAHAVPFYGCVNWTNENFPFNDCVEKMIIWWEEGKMTAKVVETAKAILGGSRVRVDQKCKASVPIEPTPVIITSNTNMCYVIDGNTTTFEHKQPLEDRMFKLELLTRLPDDFGKVTKQEVRQFFRWSQDHLTPVIPEFLVRKAESRKRPAPSGEGYISPTKRPALAEQQQASESADPVPTRLVGAVGQKGSECCS

SEQ ID NO: 568 - protein, 662 aa, synthetic construct
  REGION 1..662: note = Description of Artificial Sequence: Synthetic polypeptide
MRSYYEVIVQLPNDVESQVPGISDSFVNWITSREWTLPEDADWDLDQVDQVQLTLGDKIQREIRTHWGTMAKEPDFHYFIQLEQGEVFFHLHVLLETCSVKPMVLGRYIRHIQQKIVSKVYCATSLRWKDGCVVTKTKNFGGANKVRAESYIPAYLIPKQQPEVQWAWTNVPEYIKACLHRELRASLARLHFEEAGVSQSKENLARTADGAPVMPTRVSKRYMELVDWLVEKGITTEKEWLLENRESFRSFQASSNSARQIKTALQGAIQEMLLTKTAEDYLVGKDPVSDDDIRQNRIYKILELNHYDPAYVGSILVGWCQKKWGKRNTLWLFGHATTGKTNIAEAIAHAVPFYGCVNWTNENFPFNDCVEKMIIWWEEGKMTAKVVETAKAILGGSRVRVDQKCKASVPIEPTPVIITSNTNMCYVIDGNTTTFEHKQPLEDRMFKLELLTRLPDDFGKVTKQEVRQFFRWSQDHLTPVIPEFLVRKAESRKRPAPSGEGYISPTKRPALAEQQQASESADPVPTRYRIKCSKHCGMDKMLFPCQICESMNRDINICAIHKTTDCKECFPDYGDKDDVELPPCTEHNVSRCYQCHSGELYRVTSDSDEKPAPESDEGTEPSYAPCTIHHLMGKSHGLVTCAACRLKNSTLHDDLDDGDLEQ

SEQ ID NO: 569 - protein, 541 aa, synthetic construct
  REGION 1..541: note = Description of Artificial Sequence: Synthetic polypeptide
MRSYYEVIVQLPNDVESQVPGISDSFVNWITSREWTLPEDADWDLDQVDQVQLTLGDKIQREIRTHWGTMAKEPDFHYFIQLEQGEVFFHLHVLLETCSVKPMVLGRYIRHIQQKIVSKVYCATSLRWKDGCVVTKTKNFGGANKVRAESYIPAYLIPKQQPEVQWAWTNVPEYIKACLHRELRASLARLHFEEAGVSQSKENLARTADGAPVMPTRVSKRYMELVDWLVEKGITTEKEWLLENRESFRSFQASSNSARQIKTALQGAIQEMLLTKTAEDYLVGKDPVSDDDIRQNRIYKILELNHYDPAYVGSILVGWCQKKWGKRNTLWLFGHATTGKTNIAEAIAHAVPFYGCVNWTNENFPFNDCVEKMIIWWEEGKMTAKVVETAKAILGGSRVRVDQKCKASVPIEPTPVIITSNTNMCYVIDGNTTTFEHKQPLEDRMFKLELLTRLPDDFGKVTKQEVRQFFRWSQDHLTPVIPEFLVRKAESRKRPAPSGEGYISPTKRPALAEQQQASESADPVPTRLVGAVGQKGSECCS

SEQ ID NO: 570 - protein, 743 aa, synthetic construct
  REGION 1..743: note = Description of Artificial Sequence: Synthetic polypeptide
MSLISDAIPDWLERLVKKGVNAAADFYHLESGPPRPKANQQTQESLEKDDSRGLVFPGYNYLGPFNGLDKGEPVNEADAAALEHDKAYDLEIKDGHNPYFEYNEADRRFQERLKDDTSFGGNLGKAIFQAKKRVLEPFGLVEDSKTAPTGDKRKGEDEPRLPDTSSQTPKKNKKPRKERPSGGAEDPGEGTSSNAGAAAPASSVGSSIMAEGGGGPVGDAGQGADGVGNSSGNWHCDSQWLENGVVTRTTRTWVLPSYNNHLYKRIQGPSGGDNNNKFFGFSTPWGYFDYNRFHCHFSPRDWQRLINNNWGIRPKAMRFRLFNIQVKEVTVQDFNTTIGNNLTSTVQVFADKDYQLPYVLGSATEGTFPPFPADIYTIPQYGYCTLNYNNEAVDRSAFYCLDYFPSDMLRTGNNFEFTYTFEDVPFHSMFAHNQTLDRLMNPLVDQYLWAFSSVSQAGSSGRALHYSRATKTNMAAQYRNWLPGPFFRDQQIFTGASNITKNNVFSVWEKGKQWELDNRTNLMQPGPAAATTFSGEPDRQAMQNTLAFSRTVYDQTTATTDRNQILITNEDEIRPTNSVGIDAWGAVPTNNQSIVTPGTRAAVNNQGALPGMVWQNRDIYPTGTHLAKIPDTDNHFHPSPLIGRFGCKHPPPQIFIKNTPVPANPSETFQTAKVASFINQYSTGQCTVEIFWELKKETSKRWNPEIQFTSNFGNAADIQFAVSDTGSYSEPRPIGTRYLTKPL

SEQ ID NO: 571 - protein, 598 aa, synthetic construct
  REGION 1..598: note = Description of Artificial Sequence: Synthetic polypeptide
TAPTGDKRKGEDEPRLPDTSSQTPKKNKKPRKERPSGGAEDPGEGTSSNAGAAAPASSVGSSIMAEGGGGPVGDAGQGADGVGNSSGNWHCDSQWLENGVVTRTTRTWVLPSYNNHLYKRIQGPSGGDNNNKFFGFSTPWGYFDYNRFHCHFSPRDWQRLINNNWGIRPKAMRFRLFNIQVKEVTVQDFNTTIGNNLTSTVQVFADKDYQLPYVLGSATEGTFPPFPADIYTIPQYGYCTLNYNNEAVDRSAFYCLDYFPSDMLRTGNNFEFTYTFEDVPFHSMFAHNQTLDRLMNPLVDQYLWAFSSVSQAGSSGRALHYSRATKTNMAAQYRNWLPGPFFRDQQIFTGASNITKNNVFSVWEKGKQWELDNRTNLMQPGPAAATTFSGEPDRQAMQNTLAFSRTVYDQTTATTDRNQILITNEDEIRPTNSVGIDAWGAVPTNNQSIVTPGTRAAVNNQGALPGMVWQNRDIYPTGTHLAKIPDTDNHFHPSPLIGRFGCKHPPPQIFIKNTPVPANPSETFQTAKVASFINQYSTGQCTVEIFWELKKETSKRWNPEIQFTSNFGNAADIQFAVSDTGSYSEPRPIGTRYLTKPL

SEQ ID NO: 572 - DNA, 4694 bp, synthetic construct
  misc_feature 1..4694: note = Description of Artificial Sequence: Synthetic polynucleotide
  source 1..4694: mol_type = other DNA
tggccagtttccaagacaggctcgctcgctcactcgggccggggccccaaaggggcccctagcgaccgcttcgcggtcgcggcccgagtgagcgagcgagcctgtcttggaaactggccagcactccggtgaggtaatgccgtcacgtggtcgggaatgggaacgggaaatctcgcgagaacgtaaacaaatataagacggcgccacacggcgctgcgtcatacgcgcgcgcgcaccggcgagatgaggtcgtactacgaggtcatcgttcagctgcccaacgacgtcgagagtcaggtacctggaatctccgattcgttcgtcaactggattacgtcgcgagaatggacgttgcctgaggacgccgattgggatttggaccaggtcgatcaagttcaactgacgctcggcgacaaaatccaacgggagattcgaactcattgggggacgatggccaaagaaccggactttcactattttatccaactggaacaaggtgaggtgttctttcatttacacgtcctgctggaaacgtgttccgtaaagccgatggtactcggaagatatatccgacatattcaacaaaaaattgtgagtaaagtctactgcgccacgagcctacgatggaaggatggatgcgtggtgaccaagaccaaaaatttcgggggcgcgaacaaggtccgggccgagtcgtatattcccgcctacctgatcccgaaacagcaaccggaagtgcagtgggcgtggactaacgtgcccgagtatataaaagcgtgcttgcaccgagaactgcgtgccagtctcgcgcgacttcacttcgaggaggcgggcgtctcgcaatccaaggaaaatctcgcgagaactgcagacggcgctcccgtgatgccgacccgcgtcagcaaacgctacatggagctcgtggattggctcgtggagaaggggatcaccaccgagaaggaatggctgctggaaaacagagaaagctttcggagctttcaggcctcgagcaactcggcgcgtcagatcaagacggccctgcaaggcgccattcaggagatgcttctgaccaagacggcggaggactacctcgtcggaaaggatcccgtctcggacgacgacatccgtcagaaccgcatctacaagattctggaactgaaccactacgacccagcgtacgtggggagtattttggtcgggtggtgccagaagaaatggggcaagcgaaacacgctgtggctgttcggacatgcgaccaccggcaagaccaacatcgcggaggctattgcccatgctgtgccgttctatggatgcgttaactggaccaacgagaactttccgttcaacgactgcgtcgaaaaaatgattatctggtgggaggagggcaaaatgaccgccaaagtggtggaaacagccaaggcgattctgggaggatctcgggtgagagtggaccaaaaatgcaaagcttcggttccgatcgaaccgacgccggtcattattaccagtaacaccaacatgtgttatgtcatcgacgggaacacgaccacgttcgagcataagcagccgttggaggacaggatgtttaagctcgaattgctgactcggttgcctgatgactttggtaaggtgaccaaacaggaggtgcgtcaattcttcaggtggtctcaggatcacctgacccctgtgatcccagaattcctagtgcggaaggcggagtctcgcaaaagacccgccccttccggggaaggctatataagcccgacaaagcggcccgcgctcgcagagcagcagcaggcgtcggagagcgcggacccggttcccaccaggtatcgtatcaaatgctcgaaacattgcggtatggataaaatgttgtttccttgccaaatttgtgaatcgatgaacagagatattaatatttgtgctattcataaaacgaccgactgtaaagagtgtttccccgactacggggataaagatgatgtagaactacccccctgtacagaacacaacgtgtctcgttgttatcaatgtcattcgggcgaattgtatcgcgtgacttcggactctgacgagaaacctgcccccgagagtgatgaaggcaccgagccatcctatgctccctgcacgattcaccacctgatgggcaagagtcacgggttagtcacttgcgcggcgtgtcggttgaaaaatagtacgttgcatgatgacttggatgacggtgatctcgaacaataaatgattgaaatgtagccatgtctctcatttctgatgcgattccagattggttggagcggttggtcaaaaagggagtgaatgctgcagctgatttctaccatttggaaagcggtcctcctcgtcctaaggcaaatcagcaaactcaagaatctcttgaaaaggacgattcgagaggtctcgtgttcccaggctacaattatctaggccctttcaacggtctagataaaggagaacccgtcaacgaggcagacgctgccgccttagaacacgacaaggcttacgacctcgaaatcaaggacgggcacaacccgtactttgagtacaacgaggccgacagacgtttccaggaacgtctcaaagacgatacctcctttggaggcaatttaggtaaagccatcttccaggccaaaaagagggttctcgaaccctttggtctggtggaagactcaaagacggctccgaccggagacaagcggaaaggcgaagacgaacctcgtttgcccgacacttcttcacagactcccaagaaaaacaagaagcctcgcaaggaaagaccttccggcggggcagaagatccgggcgaaggcacctcttccaacgctggagcagcagcacccgcctctagtgtgggatcatctatcatggctgaaggaggtggcggcccagtgggcgatgcaggccagggtgccgatggagtgggcaattcctccggaaattggcattgcgattcccaatggctggaaaacggagtcgtcactcgaaccacccgaacctgggtcttgcccagctacaacaaccacctgtacaaacgaatccaaggacccagcggaggcgacaacaacaacaaattctttggattcagcaccccctggggatactttgactacaatcgattccactgccacttttccccgcgagactggcaacgactcatcaacaacaactggggcatccgtcccaaagcgatgcgctttagactctttaacatccaggttaaagaggtcacggtccaagacttcaacaccaccatcggcaacaacctcaccagtacggtccaggtctttgcggacaaggactaccaactgccgtacgtcctcggatcggctaccgaaggcaccttcccgccgttcccagcggatatctacacgatcccgcagtacgggtactgcacgctaaactacaacaacgaggcggtggatcgttcggccttctactgtctggactactttccctcagacatgctgcggacaggaaataactttgagtttacttacaccttcgaggacgttcctttccatagcatgtttgcccacaaccagacgctagaccggctgatgaatcccctcgtggatcagtacctctgggctttcagctccgtcagccaagcaggctcatctggacgagctcttcattactcgcgggcgactaaaaccaacatggcggctcaatataggaactggttacctgggcctttcttccgtgatcagcaaatctttacgggcgctagcaacatcactaaaaataacgtctttagcgtttgggaaaaaggcaagcaatgggaactcgacaatcggaccaacctaatgcagcccggtcctgcggcagcgaccacctttagcggagaacctgaccgtcaagccatgcaaaacacgctggcttttagcaggaccgtctacgatcaaacgaccgccacgaccgatcgtaaccagatactcatcaccaacgaagacgaaatcagacccaccaactcggtcggtatcgacgcgtggggagcagttcccaccaacaaccagtcgatcgtgacccccggcactcgcgcggccgtcaacaatcaaggggcgcttcccgggatggtgtggcaaaacagagacatttaccctacagggacccatttggccaaaattcccgacactgacaatcacttccatccgtccccgcttattgggcggtttggctgcaagcatccccctccccagattttcattaaaaacacacccgtccctgccaacccttcggaaacgttccagacggccaaagtggcctccttcatcaaccagtactcgaccggacagtgcaccgtcgaaatcttttgggaactcaagaaggaaacctccaagcgctggaaccccgaaatccagttcacctccaactttggcaacgcggccgacatccagtttgccgtctccgacacgggatcctattccgaacctcgtcccatcggtacccgttaccttaccaaacctctgtaaattaaacccttcaataaaccgtttatgcgtaactgtatttccgtctcctgtcgttattcagtcacatgatgcggcattacctcaccggagtgctggccagtttccaagacaggctcgctcgctcactcgggccggggccccaaaggggcccctagcgaccgcttcgcggtcgcggcccgagtgagcgagcgagcctgtcttggaaactggcca

SEQ ID NO: 573 - DNA, 2211 bp, synthetic construct
  misc_feature 1..2211: note = Description of Artificial Sequence: Synthetic polynucleotide
  source 1..2211: mol_type = other DNA
atggctgctgatggttatcttccagattggctcgaggacactctctctgaaggaataagacagtggtggaagctcaaacctggcccaccaccaccaaagcccgcagagcggcataaggacgacagcaggggtcttgtgcttcctgggtacaagtacctcggacccttcaacggactcgacaagggagagccggtcaacgaggcagacgcagcggccctcgagcacgacaaggcctacgaccagcagctcaaggccggtgacaacccctacctcaagtacaaccacgccgacgcggagttccagcagcggcttcagggcgacacatcgtttgggggcaacctcggcagagcagtcttccaggccaaaaagagggttcttgaacctcttggtctggttgagcaagcgggtgagacggctcctggaaagaagagaccgttgattgaatccccccagcagcccgactcctccacgggtatcggcaaaaaaggcaagcagccggctaaaaagagactcaattttggtcagactggcgactcagagtcagtccccgacccacaacctctcggagaacctccagcaacccccgctgctgtgggacctactacaatggcttcaggtggtggcgcaccaatggcagacaataacgaaggcgccgacggagtgggtaatgcctcaggaaattggcattgcgattccacatggctgggcgacagagtcatcaccaccagcacccgcacctgggccttgcccacctacaataaccacctctacaagcaaatctccagtgcttcaacgggggccagcaacgacaaccactacttcggctacagcaccccctgggggtattttgacttcaacagattccactgccacttttcaccacgtgactggcagcgactcatcaacaacaattggggattccggcccaagagactcaacttcaaactcttcaacatccaagtcaaggaggtcacgacgaatgatggcgtcacaaccatcgctaataaccttaccagcacggttcaagtcttctcggactcagactatcagctcccgtacgtgctcgggtcggctcacgagggctgcctcccgccgttcccagcagacgtcttcatggtgccacagtatggatacctcaccctgaacaacgggagtcaggcagtaggacgctcttcattttactgcctggagtactttccttctcagatgctgcgtaccggaaacaactttaccttcagctacacttttgaggacgttcctttccacagcagctacgctcacagccagagtctggaccgtctcatgaatcctctcatcgaccagtacctgtattacctgaacagaactcagaatcagtccggaagtgcccaaaacaaggacttgctgtttagccgggggtctccagctggcatgtctgttcagcccaaaaactggctacctggaccctgttatcggcagcagcgcgtttctaaaacaaaaacagacaacaacaacagcaactttacctggactggtgcttcaaaatataaccttaatgggcgtgaatctataatcaaccctggcactgctatggcctcacacaaagacgacaaagacaagttctttcccatgagcggtgtcatgatttttggaaaggagagcgccggagcttcaaacactgcattggacaatgtcatgatcacagacgaagaggaaatcaaagccactaaccccgtggccaccgaaagatttgggactgtggcagtcaatctccagagcagcagcacagaccctgcgaccggagatgtgcatgttatgggagccttacctggaatggtgtggcaagacagagacgtatacctgcagggtcccatttgggccaaaattcctcacacagatggacactttcacccgtctcctcttatgggcggctttggactcaagaacccgcctcctcagatcctcatcaaaaacacgcctgttcctgcgaatcctccggcggagttttcagctacaaagtttgcttcattcatcacccaatactccacaggacaagtgagtgtggaaattgaatgggagctgcagaaagaaaacagcaagcgctggaatcccgaagtgcagtacacatccaattatgcaaaatctgccaacgttgattttactgtggacaacaatggactttatactgagcctcgccccattggcacccgttacctcacccgtcccctgtaa

SEQ ID NO: 574 - protein, 736 aa, synthetic construct
  REGION 1..736: note = Description of Artificial Sequence: Synthetic polypeptide
MAADGYLPDWLEDTLSEGIRQWWKLKPGPPPPKPAERHKDDSRGLVLPGYKYLGPFNGLDKGEPVNEADAAALEHDKAYDQQLKAGDNPYLKYNHADAEFQQRLQGDTSFGGNLGRAVFQAKKRVLEPLGLVEQAGETAPGKKRPLIESPQQPDSSTGIGKKGKQPAKKRLNFGQTGDSESVPDPQPLGEPPATPAAVGPTTMASGGGAPMADNNEGADGVGNASGNWHCDSTWLGDRVITTSTRTWALPTYNNHLYKQISSASTGASNDNHYFGYSTPWGYFDFNRFHCHFSPRDWQRLINNNWGFRPKRLNFKLFNIQVKEVTTNDGVTTIANNLTSTVQVFSDSDYQLPYVLGSAHEGCLPPFPADVFMVPQYGYLTLNNGSQAVGRSSFYCLEYFPSQMLRTGNNFTFSYTFEDVPFHSSYAHSQSLDRLMNPLIDQYLYYLNRTQNQSGSAQNKDLLFSRGSPAGMSVQPKNWLPGPCYRQQRVSKTKTDNNNSNFTWTGASKYNLNGRESIINPGTAMASHKDDKDKFFPMSGVMIFGKESAGASNTALDNVMITDEEEIKATNPVATERFGTVAVNLQSSSTDPATGDVHVMGALPGMVWQDRDVYLQGPIWAKIPHTDGHFHPSPLMGGFGLKNPPPQILIKNTPVPANPPAEFSATKFASFITQYSTGQVSVEIEWELQKENSKRWNPEVQYTSNYAKSANVDFTVDNNGLYTEPRPIGTRYLTRPL

SEQ ID NO: 575 - DNA, 2211 bp, synthetic construct
  misc_feature 1..2211: note = Description of Artificial Sequence: Synthetic polynucleotide
  source 1..2211: mol_type = other DNA
atggcttccgatggttatcttccagattggctcgaggacaacctctctgagggcatccgcgagtggtgggacttgaaacctggagccccgaaacccaaagccaaccagcaaaagcaggacgacggccggggtctggtgcttcctggctacaagtacctcggacccttcaacggactcgacaagggggagcccgtcaacgcggcggatgcagcggccctcgagcacgacaaggcctacgaccagcagctcagagcgggtgacaatccgtacctgcggtataaccacgccgacgccgagtttcaggagcgtctgcaagaagatacgtcttttgggggcaacctcgggcgagcagtcttccaggccaagaagagggttctcgaaccttttggtctggttgaggaaggtgctaagacggctcctggaaagaaacgtccggtagagcagtcgccacaagagccagactcctcctcgggcattggcaagacaggccagcagcccgctaaaaagagactcaattttggtcagactggcgactcagagtcagtccccgacccacaacctctcggagaacctccagcaacccccgctgctgtgggacctactacaatggcttcaggcggtggcgcaccaatggcagacaataacgaaggcgccgacggagtgggtaatgcctcaggaaattggcattgcgattccacatggctgggcgacagagtcatcaccaccagcacccgaacatgggccttgcccacctataacaaccacctctacaagcaaatctccagtgcttcaacgggggccagcaacgacaaccactacttcggctacagcaccccctgggggtattttgatttcaacagattccactgccatttctcaccacgtgactggcagcgactcatcaacaacaattggggattccggcccaagagactcaacttcaaactcttcaacatccaagtcaaggaggtcacgacgaatgatggcgtcacaaccatcgctaataaccttaccagcacggttcaagtcttctcggactcggagtaccagcttccgtacgtcctcggctctgcgcaccagggctgcctccctccgttcccggcggacgtgttcatgattccgcagtacggctacctaacgctcaacaatggcagccaggcagtgggacggtcatccttttactgcctggaatatttcccatcgcagatgctgagaacgggcaataactttaccttcagctacaccttcgaggacgtgcctttccacagcagctacgcgcacagccagagcctggaccggctgatgaatcctctcatcgaccagtacctgtattacctgaacagaactcagaatcagtccggaagtgcccaaaacaaggacttgctgtttagccgggggtctccagctggcatgtctgttcagcccaaaaactggctacctggaccctgttaccggcagcagcgcgtttctaaaacaaaaacagacaacaacaacagcaactttacctggactggtgcttcaaaatataaccttaatgggcgtgaatctataatcaaccctggcactgctatggcctcacacaaagacgacaaagacaagttctttcccatgagcggtgtcatgatttttggaaaggagagcgccggagcttcaaacactgcattggacaatgtcatgatcacagacgaagaggaaatcaaagccactaaccccgtggccaccgaaagatttgggactgtggcagtcaatctccagagcagcagcacagaccctgcgaccggagatgtgcatgttatgggagccttacctggaatggtgtggcaagacagagacgtatacctgcagggtcccatttgggccaaaattcctcacacagatggacactttcacccgtctcctcttatgggcggctttggacttaagcacccgcctcctcagatcctcatcaaaaacacgcctgttcctgcgaatcctccggcagagttttcggctacaaagtttgcttcattcatcacccagtattctactggccaagtcagcgtggagattgaatgggagctgcagaaagaaaacagcaaacgctggaatcccgaagtgcagtatacatctaactatgcaaaatctgccaacgttgatttcactgtggacaacaatggactttatactgagcctcgtcccattggcacccgttacctcacccgtcccctgtaa

SEQ ID NO: 576 - protein, 736 aa, synthetic construct
  REGION 1..736: note = Description of Artificial Sequence: Synthetic polypeptide
MASDGYLPDWLEDNLSEGIREWWDLKPGAPKPKANQQKQDDGRGLVLPGYKYLGPFNGLDKGEPVNAADAAALEHDKAYDQQLRAGDNPYLRYNHADAEFQERLQEDTSFGGNLGRAVFQAKKRVLEPFGLVEEGAKTAPGKKRPVEQSPQEPDSSSGIGKTGQQPAKKRLNFGQTGDSESVPDPQPLGEPPATPAAVGPTTMASGGGAPMADNNEGADGVGNASGNWHCDSTWLGDRVITTSTRTWALPTYNNHLYKQISSASTGASNDNHYFGYSTPWGYFDFNRFHCHFSPRDWQRLINNNWGFRPKRLNFKLFNIQVKEVTTNDGVTTIANNLTSTVQVFSDSEYQLPYVLGSAHQGCLPPFPADVFMIPQYGYLTLNNGSQAVGRSSFYCLEYFPSQMLRTGNNFTFSYTFEDVPFHSSYAHSQSLDRLMNPLIDQYLYYLNRTQNQSGSAQNKDLLFSRGSPAGMSVQPKNWLPGPCYRQQRVSKTKTDNNNSNFTWTGASKYNLNGRESIINPGTAMASHKDDKDKFFPMSGVMIFGKESAGASNTALDNVMITDEEEIKATNPVATERFGTVAVNLQSSSTDPATGDVHVMGALPGMVWQDRDVYLQGPIWAKIPHTDGHFHPSPLMGGFGLKHPPPQILIKNTPVPANPPAEFSATKFASFITQYSTGQVSVEIEWELQKENSKRWNPEVQYTSNYAKSANVDFTVDNNGLYTEPRPIGTRYLTRPL

SEQ ID NO: 577 - DNA, 2211 bp, synthetic construct
  misc_feature 1..2211: note = Description of Artificial Sequence: Synthetic polynucleotide
  source 1..2211: mol_type = other DNA
atggctgctgatggttatcttccagattggctcgaggacactctctctgaaggaataagacagtggtggaagctcaaacctggcccaccaccaccaaagcccgcagagcggcataaggacgacagcaggggtcttgtgcttcctgggtacaagtacctcggacccttcaacggactcgacaagggagagccggtcaacgaggcagacgcagcggccctcgagcacgacaaggcctacgaccagcagctcaaggccggtgacaacccctacctcaagtacaaccacgccgacgcggagttccagcagcggcttcagggcgacacatcgtttgggggcaacctcggcagagcagtcttccaggccaaaaagagggttcttgaacctcttggtctggttgagcaagcgggtgagacggctcctggaaagaagagaccgttgattgaatccccccagcagcccgactcctccacgggtatcggcaaaaaaggcaagcagccggctaaaaagagactcaattttggtcagactggcgactcagagtcagtccccgacccacaacctctcggagaacctccagcaacccccgctgctgtgggacctactacaatggcttcaggtggtggcgcaccaatggcagacaataacgaaggcgccgacggagtgggtaatgcctcaggaaattggcattgcgattccacatggctgggcgacagagtcatcaccaccagcacccgcacctgggccttgcccacctacaataaccacctctacaagcaaatctccagtgcttcaacgggggccagcaacgacaaccactacttcggctacagcaccccctgggggtattttgacttcaacagattccactgccacttttcaccacgtgactggcagcgactcatcaacaacaattggggattccggcccaagagactcaacttcaaactcttcaacatccaagtcaaggaggtcacgacgaatgatggcgtcacaaccatcgctaataaccttaccagcacggttcaagtcttctcggactcagactatcagctcccgtacgtgctcgggtcggctcacgagggctgcctcccgccgttcccagcagacgtcttcatggtgccacagtatggatacctcaccctgaacaacgggagtcaggcagtaggacgctcttcattttactgcctggagtactttccttctcagatgctgcgtaccggaaacaactttaccttcagctacacttttgaggacgttcctttccacagcagctacgctcacagccagagtctggaccgtctcatgaatcctctcatcgaccagtacctgtattacctgaacagaactcagaatcagtccggaagtgcccaaaacaaggacttgctgtttagccgggggtctccaactggcatgtctgttcagcccaaaaactggctacctggaccctgttatcggcagcagcgcgtttctaaaacaaaaacagacaacaacaacagcaactttacctggactggtgcttcaaaatataaccttaatgggcgtgaatctataatcaaccctggcactgctatggcctcacacaaagacgacaaagacaagttctttcccatgagcggtgtcatgatttttggaaaggagagcgccggagcttcaaacactgcattggacaatgtcatgatcacagacgaagaggaaatcaaagccactaaccccgtggccactgaaagatttgggactgtggcagtcaatctccagagcagcagcacagaccctgcgaccggagatgtgcatgccatgggagccttacctggaatggtgtggcaagacagagacgtatacctgcagggtcctatttgggccaaaattcctcacacggatggacactttcacccgtctcctctcatgggcggctttggactcaagaacccgcctcctcagatcctcatcaaaaacacgcctgttcctgcgaatcctccggcggagttttcagctacaaagtttgcttcattcatcacccagtattccacaggacaagtgagcgtggagattgaatgggagctgcagaaagaaaacagcaaacgctggaatcccgaagtgcagtatacatctaactatgcaaaatctgccaacgttgatttcactgtggacaacaatggactttatactgagcctcgccccattggcacccgttacctcacccgtcccctgtaa

SEQ ID NO: 578 - protein, 736 aa, synthetic construct
  REGION 1..736: note = Description of Artificial Sequence: Synthetic polypeptide
MAADGYLPDWLEDTLSEGIRQWWKLKPGPPPPKPAERHKDDSRGLVLPGYKYLGPFNGLDKGEPVNEADAAALEHDKAYDQQLKAGDNPYLKYNHADAEFQQRLQGDTSFGGNLGRAVFQAKKRVLEPLGLVEQAGETAPGKKRPLIESPQQPDSSTGIGKKGKQPAKKRLNFGQTGDSESVPDPQPLGEPPATPAAVGPTTMASGGGAPMADNNEGADGVGNASGNWHCDSTWLGDRVITTSTRTWALPTYNNHLYKQISSASTGASNDNHYFGYSTPWGYFDFNRFHCHFSPRDWQRLINNNWGFRPKRLNFKLFNIQVKEVTTNDGVTTIANNLTSTVQVFSDSDYQLPYVLGSAHEGCLPPFPADVFMVPQYGYLTLNNGSQAVGRSSFYCLEYFPSQMLRTGNNFTFSYTFEDVPFHSSYAHSQSLDRLMNPLIDQYLYYLNRTQNQSGSAQNKDLLFSRGSPTGMSVQPKNWLPGPCYRQQRVSKTKTDNNNSNFTWTGASKYNLNGRESIINPGTAMASHKDDKDKFFPMSGVMIFGKESAGASNTALDNVMITDEEEIKATNPVATERFGTVAVNLQSSSTDPATGDVHAMGALPGMVWQDRDVYLQGPIWAKIPHTDGHFHPSPLMGGFGLKNPPPQILIKNTPVPANPPAEFSATKFASFITQYSTGQVSVEIEWELQKENSKRWNPEVQYTSNYAKSANVDFTVDNNGLYTEPRPIGTRYLTRPL

SEQ ID NO: 579 - DNA, 2211 bp, synthetic construct
  misc_feature 1..2211: note = Description of Artificial Sequence: Synthetic polynucleotide
  source 1..2211: mol_type = other DNA
atggctgccgatggttatcttccagattggctcgaggacaacctctctgagggcattcgcgagtggtgggcgctgaaacctggagccccgaagcccaaagccaaccagcaaaagcaggacgacggccggggtctggtgcttcctggctacaagtacctcggacccttcaacggactcgacaagggggagcccgtcaacgcggcggatgcagcggccctcgagcacgacaaggcctacgaccagcagctcaaagcgggtgacaatccgtacctgcggtataaccacgccgacgccgagtttcaggagcgtctgcaagaagatacgtcttttgggggcaacctcgggcgagcagtcttccaggccaagaagcgggttctcgaacctctcggtctggttgaggaaggcgctaagacggctcctggaaagaaacgtccggtagagcaatcgccacaagagccagactcctcctcgggcatcggcaagacaggccagcagcccgctaaaaagagactcaattttggtcagactggcgactcagagtcagtccccgacccacaacctctcggagaacctccagcaacccccgctgctgtgggacctactacaatggcttcaggcggtggcgcaccaatggcagacaataacgaaggcgccgacggagtgggtaatgcctcaggaaattggcattgcgattccacatggctgggcgacagagtcatcaccaccagcacccgaacatgggccttgcccacctataacaaccacctctacaagcaaatctccagtgcttcgacgggggccagcaacgacaaccactacttcggctacagcaccccctgggggtattttgactttaacagattccactgccacttttcaccacgtgactggcagcgactcatcaacaacaactggggattccggcccaagagactcagcttcaagctcttcaacatccaggtcaaggaggtcacgacgaatgatggcgtcacaaccatcgctaataaccttaccagcacggttcaagtcttctcggactcggagtaccagcttccgtacgtcctcggctctgcgcaccagggctgcctccctccgttcccggcggacgtgttcatgattccgcaatacggctacctgacgctcaacaatggcagccaagccgtgggacgttcatccttttactgcctggaatatttcccttctcagatgctgagaacgggcaacaactttaccttcagctacacctttgaggaagtgcctttccacagcagctacgcgcacagccagagcctggaccggctgatgaatcctctcatcgatcaatacctgtattacctgaacagaactcaaaatcagtccggaagtgcccaaaacaaggacttgctgtttagccgtgggtctccagctggcatgtctgttcagcccaaaaactggctacctggaccctgttatcggcagcagcgcgtttctaaaacaaaaacagacaacaacaacagcaattttacctggactggtgcttcaaaatataacctcaatgggcgtgaatccatcatcaaccctggcactgctatggcctcacataaagacgacgaagacaagttctttcccatgagcggtgtcatgatttttggaaaagagagcgccggagcttcaaacactgcattggacaatgtcatgattacagacgaagaggaaattaaagccactaaccctgtggccaccgaaagatttgggaccgtggcagtcaatttccagagcagcagcacagaccctgcgaccggagatgtgcatgctatgggagcattacctggcatggtgtggcaagatagagacgtgtacctgcagggtcccatttgggccaaaattcctcacacagatggacactttcacccgtctcctcttatgggcggctttggactcaagaacccgcctcctcagatcctcatcaaaaacacgcctgttcctgcgaatcctccggcggagttttcagctacaaagtttgcttcattcatcacccaatactccacaggacaagtgagcgtggagattgaatgggagctgcagaaagaaaacagcaaacgctggaatcccgaagtgcagtatacatctaactatgcaaaatctgccaacattgatttcactgtggacaacaatggactttatactgagcctcgccccattggcacccgttacctcacccgtccccagtaa

SEQ ID NO: 580 - protein, 736 aa, synthetic construct
  REGION 1..736: note = Description of Artificial Sequence: Synthetic polypeptide
MAADGYLPDWLEDNLSEGIREWWALKPGAPKPKANQQKQDDGRGLVLPGYKYLGPFNGLDKGEPVNAADAAALEHDKAYDQQLKAGDNPYLRYNHADAEFQERLQEDTSFGGNLGRAVFQAKKRVLEPLGLVEEGAKTAPGKKRPVEQSPQEPDSSSGIGKTGQQPAKKRLNFGQTGDSESVPDPQPLGEPPATPAAVGPTTMASGGGAPMADNNEGADGVGNASGNWHCDSTWLGDRVITTSTRTWALPTYNNHLYKQISSASTGASNDNHYFGYSTPWGYFDFNRFHCHFSPRDWQRLINNNWGFRPKRLSFKLFNIQVKEVTTNDGVTTIANNLTSTVQVFSDSEYQLPYVLGSAHQGCLPPFPADVFMIPQYGYLTLNNGSQAVGRSSFYCLEYFPSQMLRTGNNFTFSYTFEEVPFHSSYAHSQSLDRLMNPLIDQYLYYLNRTQNQSGSAQNKDLLFSRGSPAGMSVQPKNWLPGPCYRQQRVSKTKTDNNNSNFTWTGASKYNLNGRESIINPGTAMASHKDDEDKFFPMSGVMIFGKESAGASNTALDNVMITDEEEIKATNPVATERFGTVAVNFQSSSTDPATGDVHAMGALPGMVWQDRDVYLQGPIWAKIPHTDGHFHPSPLMGGFGLKNPPPQILIKNTPVPANPPAEFSATKFASFITQYSTGQVSVEIEWELQKENSKRWNPEVQYTSNYAKSANIDFTVDNNGLYTEPRPIGTRYLTRPQ

SEQ ID NO: 581 - DNA, 2211 bp, synthetic construct
  misc_feature 1..2211: note = Description of Artificial Sequence: Synthetic polynucleotide
  source 1..2211: mol_type = other DNA
atggctgccgatggttatcttccagattggctcgaggacaacctctctgagggcattcgcgagtggtgggacttgaaacctggagccccgaaacccaaagccaaccagcaaaagcaggacgacggccggggtctggtgcttcctggctacaagtacctcggacccttcaacggactcgacaagggggagcccgtcaacgcggcggatgcagcggccctcgagcacgacaaggcctacgaccagcagctcaaagcgggtgacaatccgtaccttcggtataaccacgccgacgccgagtttcaggagcgtctgcaagaagatacgtcttttgggggcaacctcgggcgagcagtcttccaggccaaaaagagggttctcgaacctctcggtctggttgaggaagcggctaagacggctcctggaaagaaacgtccggtagagcagtcgccacaagagccagactcctcctcgggcattggcaagacaggccagcagcccgctaaaaagagactcaattttggtcagactggcgactcagagtcagtccccgacccacaacctctcggagaacctcccgcagccccctcaggtgtgggatctcttacaatggcttcaggtggtggcgcaccaatggcagacaataacgaaggcgccgacggagtgggtaatgcctcaggaaattggcattgcgattccacatggctgggcgacagagtcatcaccaccagcacccgcacctgggccttgcccacctacaataaccacctctacaagcaaatctccagtgcttcaacgggggccagcaacgacaaccactacttcggctacagcaccccctgggggtattttgacttcaacagattccactgccacttttcaccacgtgactggcaaagactcatcaacaacaattggggattccggcccaagagactcaacttcaagctcttcaacatccaagtcaaggaggtcacgacgaatgatggcgtcacgaccatcgctaataaccttaccagcacggttcaagtcttctcggactcggagtaccagttgccgtacgtcctcggctctgcgcaccagggctgcctccctccgttcccggcggacgtgttcatgattccgcagtacggctacctaacgctcaacaatggcagccaggcagtgggacggtcatccttttactgcctggaatatttcccatcgcagatgctgagaacgggcaacaactttaccttcagctacacctttgaggaagtgcctttccacagcagctacgcgcacagccagagcctggaccggctgatgaatcctctcatcgaccagtacctgtattacctgaacagaactcaaaatcagtccggaagtgcccaaaacaaggacttgctgtttagccgtgggtctccagctggcatgtctgttcagcccaaaaactggctacctggaccctgttaccggcagcagtgcgtttctaaaacaaaaacagacaacaacaacagcaactttacctggactggtgcttcaaaatataaccttaatgggcgtgaatctataatcaaccctggcactgctatggcctcacacaaagacgacaaagacaagttctttcccatgagcggtgtcatgatttttggaaaggagagcgccggagcttcaaacactgcattggacaatgtcatgatcacagacgaagaggaaatcaaagccactaaccccgtggccaccgaaagatttgggactgtggcagtcaatctccagagcagcagcacagaccctgcgaccggagatgtgcatgttatgggagccttacctggaatggtgtggcaagacagagacgtatacctgcagggtcctatttgggccaaaattcctcacacagatggacactttcacccgtctcctcttatgggcggctttggactcaagaacccgcctcctcagatcctcatcaaaaacacgcctgttcctgcgaatcctccggcggagttttcagctacaaagtttgcttcattcatcacccaatactccacaggacaagtgagcgtggagattgaatgggagctgcagaaagaaaacagcaagcgctggaatcccgaagtgcagtacacatccaattatgcaaaatctgccaacgttgatttcactgtggacaacaatggactttatactgagcctcgccccattggcacccgttacctcacccgtcccctgtaa

SEQ ID NO: 582 - protein, 736 aa, synthetic construct
  REGION 1..736: note = Description of Artificial Sequence: Synthetic polypeptide
MAADGYLPDWLEDNLSEGIREWWDLKPGAPKPKANQQKQDDGRGLVLPGYKYLGPFNGLDKGEPVNAADAAALEHDKAYDQQLKAGDNPYLRYNHADAEFQERLQEDTSFGGNLGRAVFQAKKRVLEPLGLVEEAAKTAPGKKRPVEQSPQEPDSSSGIGKTGQQPAKKRLNFGQTGDSESVPDPQPLGEPPAAPSGVGSLTMASGGGAPMADNNEGADGVGNASGNWHCDSTWLGDRVITTSTRTWALPTYNNHLYKQISSASTGASNDNHYFGYSTPWGYFDFNRFHCHFSPRDWQRLINNNWGFRPKRLNFKLFNIQVKEVTTNDGVTTIANNLTSTVQVFSDSEYQLPYVLGSAHQGCLPPFPADVFMIPQYGYLTLNNGSQAVGRSSFYCLEYFPSQMLRTGNNFTFSYTFEEVPFHSSYAHSQSLDRLMNPLIDQYLYYLNRTQNQSGSAQNKDLLFSRGSPAGMSVQPKNWLPGPCYRQQCVSKTKTDNNNSNFTWTGASKYNLNGRESIINPGTAMASHKDDKDKFFPMSGVMIFGKESAGASNTALDNVMITDEEEIKATNPVATERFGTVAVNLQSSSTDPATGDVHVMGALPGMVWQDRDVYLQGPIWAKIPHTDGHFHPSPLMGGFGLKNPPPQILIKNTPVPANPPAEFSATKFASFITQYSTGQVSVEIEWELQKENSKRWNPEVQYTSNYAKSANVDFTVDNNGLYTEPRPIGTRYLTRPL

SEQ ID NO: 583 - DNA, 2211 bp, synthetic construct
  misc_feature 1..2211: note = Description of Artificial Sequence: Synthetic polynucleotide
  source 1..2211: mol_type = other DNA
atggctgccgatggttatcttccagattggctcgaggacaacctctctgagggcattcgcgaatggtgggacttgaaacctggagccccgaaacccaaagtcaaccagcaaaagcaggacaacgctcggggtcttgtgcttccgggttacaaatacctcggacccttcaacggactcgacaagggggagcccgtcaacgcggcggacgcagcggccctcgagcacgacaaggcctacgaccagcagctcaaagcgggtgacaatccgtaccttcggtataaccacgccgacgccgagtttcaggagcgtctgcaagaagatacgtcttttgggggcaaccttggacgagcagtcttccaggccaagaagagggttctcgaaccttttggtctggttgaggaaggtgctaagacggctcctggaaagaaacgtccggtagagcagtcgccacaagagccagactcctcctcgggcattggcaagacaggccagcagcccgctaaaaagagactcaattttggtcagactggcgactcagagtcagtccccgacccacaacctctcggagaacctccagcaacccccgctgctgtgggacctactacaatggcttcaggcggtggcgcaccaatggcagacaataacgaaggcgccgacggagtgggtaatgcctcaggaaattggcattgcgattccacatggctgggcgacagagtcatcaccaccagcacccgcacctgggccttgcccacctacaataaccacctctacaagcaaatctccagtgcttcaacgggggccagcaacgacaaccactacttcggctacagcaccccctgggggtattttgacttcaacagattccactgccacttttcaccacgtgactggcaaagactcatcaacaacaattggggattccggcccaagagactcaacttcaagctcttcaacatccaagtcaaggaggtcacgacgaatgatggcgtcacgaccatcgctaataaccttaccagcacggttcaagtcttctcggactcggagtaccagttgccgtacgtcctcggctctgcgcaccagggctgcctccctccgttcccggcggacgtgttcatgattccgcaatacggctacctgacgctcaacaatggcagccaggcagtgggacggtcatccttttactgcctggaatatttcccatcgcagatgctgagaacgggcaataactttaccttcagctacacttttgaggacgttcctttccacagcagctacgctcacagccagagcctggaccggctgatgaatcctctcatcgaccagtacctgtattacctgaacagaactcagaatcagtccggaagtgcccaaaacaaggacttgctgtttagccgtgggtctccaactggcatgtctgttcagcccaaaaactggctacctggaccctgttatcggcagcagcgcgtttctaaaacaaaaacagacaacaacaacagcaactttacctggactggtgcttcaaaatataaccttaatgggcgtgaatctataatcaaccctggcactgctatggcctcacacaaagacgacgaagacaagttctttcccatgagcggtgtcatgatttttggaaaggagagcgccggagcttcaaacactgcattggacaatgtcatgatcacagacgaagaggaaatcaaagccactaaccccgtggccactgaaagatttgggactgtggcagtcaatctccagagcagcagcacagaccctgcgaccggagatgtgcatgccatgggagccttacctggaatggtgtggcaagacagagacgtatacctgcagggtcctatttgggccaaaattcctcacacggatggacactttcacccgtctcctctcatgggcggctttggacttaagcacccgcctcctcagatcctcatcaaaaacacgcctgttcctgcgaatcctccggcagagttttcggctacaaagtttgcttcattcatcacccagtattccacaggacaagtgagcgtggagattgaatgggagctgcagaaagaaaacagcaaacgctggaatcccgaagtgcagtatacatctaactatgcaaaatctgccaacgttgatttcactgtggacaacaatggactttatactgagcctcgccccattggcacccgttacctcacccgtcccctgtaa

SEQ ID NO: 584 - protein, 736 aa, synthetic construct
  REGION 1..736: note = Description of Artificial Sequence: Synthetic polypeptide
MAADGYLPDWLEDNLSEGIREWWDLKPGAPKPKVNQQKQDNARGLVLPGYKYLGPFNGLDKGEPVNAADAAALEHDKAYDQQLKAGDNPYLRYNHADAEFQERLQEDTSFGGNLGRAVFQAKKRVLEPFGLVEEGAKTAPGKKRPVEQSPQEPDSSSGIGKTGQQPAKKRLNFGQTGDSESVPDPQPLGEPPATPAAVGPTTMASGGGAPMADNNEGADGVGNASGNWHCDSTWLGDRVITTSTRTWALPTYNNHLYKQISSASTGASNDNHYFGYSTPWGYFDFNRFHCHFSPRDWQRLINNNWGFRPKRLNFKLFNIQVKEVTTNDGVTTIANNLTSTVQVFSDSEYQLPYVLGSAHQGCLPPFPADVFMIPQYGYLTLNNGSQAVGRSSFYCLEYFPSQMLRTGNNFTFSYTFEDVPFHSSYAHSQSLDRLMNPLIDQYLYYLNRTQNQSGSAQNKDLLFSRGSPTGMSVQPKNWLPGPCYRQQRVSKTKTDNNNSNFTWTGASKYNLNGRESIINPGTAMASHKDDEDKFFPMSGVMIFGKESAGASNTALDNVMITDEEEIKATNPVATERFGTVAVNLQSSSTDPATGDVHAMGALPGMVWQDRDVYLQGPIWAKIPHTDGHFHPSPLMGGFGLKHPPPQILIKNTPVPANPPAEFSATKFASFITQYSTGQVSVEIEWELQKENSKRWNPEVQYTSNYAKSANVDFTVDNNGLYTEPRPIGTRYLTRPL

SEQ ID NO: 585 - DNA, 2208 bp, synthetic construct
  misc_feature 1..2208: note = Description of Artificial Sequence: Synthetic polynucleotide
  misc_difference 955: note = modified_base - a, c, t or g
  misc_difference 971..972: note = modified_base - a, c, t or g
  misc_difference 981: note = modified_base - a, c, t or g
  misc_difference 986: note = modified_base - a, c, t or g
  misc_difference 1235: note = modified_base - a, c, t or g
  misc_difference 1694..1696: note = modified_base - a, c, t or g
  misc_difference 1698: note = modified_base - a, c, t or g
  misc_difference 1763..1765: note = modified_base - a, c, t or g
  misc_difference 1778: note = modified_base - a, c, t or g
  misc_difference 2204: note = modified_base - a, c, t or g
  source 1..2208: mol_type = other DNA
atggctgccgatggttatcttccagattggctcgaggacaacctctctgagggcattcgcgaatggtgggacttgaaacctggagccccgaaacccaaagtcaaccagcaaaagcaggacaacgctcggggtcttgtgcttccgggttacaaatacctcggacccttcaacggactcgacaagggggagcccgtcaacgcggcggacgcagcggccctcgagcacgacaaggcctacgaccagcagctcaaagcgggtgacaatccgtaccttcggtataaccacgccgacgccgagtttcaggagcgtctgcaagaagatacgtcttttgggggcaaccttggacgagcagtcttccaggccaagaagagggttctcgaaccttttggtctggttgaggaaggtgctaagacggctcctggaaagaaacgtccggtagagcagtcgccacaagagccagactcctcctcgggcattggcaagacaggccagcagcccgctaaaaagagactcaattttggtcagactggcgactcagagtcagtccccgacccacaacctctcggagaacctccagcaacccccgctgctgtgggacctactacaatggcttcaggcggtggcgcaccaatggcagacaataacgaaggcgccgacggagtgggtaatgcctcaggaaattggcattgcgattccacatggctgggcgacagagtcatcaccaccagcacccgaacatgggccttgcccacctataacaaccacctctacaagcaaatctccagtgcttcaacgggggccagcaacgacaaccactacttcggctacagcaccccctgggggtattttgatttcaacagattccactgccacttttcaccacgtgactggcagcgactcatcaataacaattggggattccggcccaagagactcaacttcaaactcttcaacntccaagtcaaggaggnnacgacgaangatgncgtcacaaccatcgctaataaccttaccagcacggttcaagtcttctcggactcggagtaccagcttccgtacgtcctcggctctgcgcaccagggctgcctccctccgttcccggcggacgtgttcatgattccgcaatacggctacctgacgctcaacaatggcagccaggcagtgggacggtcatccttttactgcctggaatatttcccatcgcagatgctgagaacgggcaataactttacctncagctacacttttgaggacgttcctttccacagcagctacgctcacagccagagcctggaccggctgatgaatcctctcatcgaccagtacctgtattacctgaacagaactcagaatcagtccggaagtgcccaaaacaaggacttgctgtttagccgtgggtctccaactggcatgtctgttcagcccaaaaactggctacctggaccctgttatcggcagcagcgcgtttctaaaacaaaaacagacaacaacaacagcaactttacctggactggtgcttcaaaatataaccttaatgggcgtgaatctataatcaaccctggcactgctatggcctcacacaaagacgacgaagacaagttctttcccatgagcggtgtcatgatttttggaaaggagagcgccggagcttcaaacactgcattggacaatgtcatgatcacagacgaagagannncnaagccactaaccccgtggccactgaaagatttgggactgtggcagtcaatctccaagcagcacannnaccctgcgaccgnagatgtgcatgccatgggagccttacctggaatggtgtggcaagacagagacgtatacctgcagggtcctatttgggccaaaattcctcacacggatggacactttcacccgtctcctctcatgggcggctttggacttaagcacccgcctcctcagatcctcatcaaaaacacgcctgttcctgcgaatcctccggcagagttttcggctacaaagtttgcttcattcatcacccagtattccacaggacaagtgagcgtggagattgaatgggagctgcagaaagaaaacagcaaacgctggaatcccgaagtgcagtatacatctaactatgcaaaatctgccaacgttgatttcactgtggacaacaatggactttatactgagcctcgccccattggcacccgttacctcacccgtccccngtaa

SEQ ID NO: 586 - protein, 723 aa, synthetic construct
  REGION 1..723: note = Description of Artificial Sequence: Synthetic polypeptide
MAADGYLPDWLEDNLSEGIREWWDLKPGAPKPKVNQQKQDNARGLVLPGYKYLGPFNGLDKGEPVNAADAAALEHDKAYDQQLKAGDNPYLRYNHADAEFQERLQEDTSFGGNLGRAVFQAKKRVLEPFGLVEEGAKTAPGKKRPVEQSPQEPDSSSGIGKTGQQPAKKRLNFGQTGDSESVPDPQPLGEPPATPAAVGPTTMASGGGAPMADNNEGADGVGNASGNWHCDSTWLGDRVITTSTRTWALPTYNNHLYKQISSASTGASNDNHYFGYSTPWGYFDFNRFHCHFSPRDWQRLINNNWGFRPKRLNFKLFNQVKETTDVTTIANNLTSTVQVFSDSEYQLPYVLGSAHQGCLPPFPADVFMIPQYGYLTLNNGSQAVGRSSFYCLEYFPSQMLRTGNNFTSYTFEDVPFHSSYAHSQSLDRLMNPLIDQYLYYLNRTQNQSGSAQNKDLLFSRGSPTGMSVQPKNWLPGPCYRQQRVSKTKTDNNNSNFTWTGASKYNLNGRESIINPGTAMASHKDDEDKFFPMSGVMIFGKESAGASNTALDNVMITDEEATNPVATERFGTVAVNLQSSPATDVHAMGALPGMVWQDRDVYLQGPIWAKIPHTDGHFHPSPLMGGFGLKHPPPQILIKNTPVPANPPAEFSATKFASFITQYSTGQVSVEIEWELQKENSKRWNPEVQYTSNYAKSANVDFTVDNNGLYTEPRPIGTRYLTRP

SEQ ID NO: 587 - DNA, 2208 bp, synthetic construct
  misc_feature 1..2208: note = Description of Artificial Sequence: Synthetic polynucleotide
  source 1..2208: mol_type = other DNA
atggctgccgatggttatcttccagattggctcgaggacactctctctgaaggaataagacagtggtggaagctcaaacctggcccaccaccaccaaagcccgcagagcggcataaggacgacagcaggggtcttgtgcttcctgggtacaagtacctcggacccttcaacggactcgacaagggagagccggtcaacgaggcagacgccgcggccctcgagcacgacaaagcctatgaccggcagctcgacagcggagacaacccgtacctcaagtacaaccacgccgacgcggagtttcaggagcgccttaaagaagatacgtcttttgggggcaacctcggacgagcagtcttccaggcgaaaaagagggttcttgaacctctgggcctggttgaggaacctgttaagacggctccgggaaaaaagaggccggtagagcactctcctgtggagccagactcctcctcgggaaccggaaaggcgggtcagcagcctgcaagaaaaagattgaattttggtcagactggagacgcagactcagtacctgacccccagcctctcggacagccaccagcagccccctctggtctgggaactaatacgatggctacaggcagtggcgcaccaatggcagacaataacgagggcgccgacggagtgggtaattcctcgggaaattggcattgcgattccacatggatgggcgacagagtcatcaccaccagcacccgaacctgggccctgcccacctacaacaaccacctctacaaacaaatttccagccaatcaggagcctcgaacgacaatcactactttggctacagcaccccttgggggtattttgacttcaacagattccactgccacttttcaccacgtgactggcaaagactcatcaacaacaactggggattccgacccaagagactcaagttcaagctctttaacattcaagtcaaagaggtcacgcagaatgacggtacgacgacgattgccaataaccttaccagcacggttcaggtgtttactgactcggagtaccagctcccgtacgtcctcggctcggcgcatcaaggatgcctcccgccgttcccagcagacgtcttcatggtgccacagtatggatacctcaccctgaacaacgggagtcaggcagtaggacgctcttcattttactgcctggagtactttccttctcagatgctgcgtaccggtaacaactttaccttcagctacacttttgaggacgttcctttccacagcagctacgctcacagccagagtctggaccgtctcatgaatcctctcatcgaccagtacctgtattacttgagcagaacagacgctccaagtggaaccaccacgcagtcaaggcttcagttttctcaggccggagcgagtgacattcgggaccagtctaggaactggcttcctggaccctgttaccgccagcagcgagtatcaaagacatctgcggataacaacaacagtgaatactcgtggactggagctaccaagtaccacctcaatggcagagactctctggtgaatccgggcccggccatggcaagccacaaggacgatgaagaaaagttttttcctcagagcggggttctcatctttgggaagcaaggctcagagaaaacaagtgtggacattgaaaaggtcatgattacagacgaagaggaaatcaggacaaccaatcccgtggctacggagcagtatggttctgtatctaccaacctccagagaggcaacagacaagcagctaccgcagatgtcaacacacaaggcgttcttccaggcatggtctggcaggacagagatgtgtaccttcaggggcccatctgggcaaagattccacacacggacggacattttcacccctctcccctcatgggtggattcggacttaaacaccctcctccacagattctcatcaagaacaccccggtacctgcgaatccttcgaccaccttcagtgcggcaaagtttgcttccttcatcacacagtactccacgggacaggtcagcgtggagatcgagtgggagctgcagaaggaaaacagcaaacgctggaatcccgaagttcagtacacttccaactacaacaagtctgttaatgtggactttactgtggacactaatggcgtgtattcagagcctcgccccattggcaccagatacctgactcgtaatctgtaa

SEQ ID NO: 588 - protein, 735 aa, synthetic construct
  REGION 1..735: note = Description of Artificial Sequence: Synthetic polypeptide
MAADGYLPDWLEDTLSEGIRQWWKLKPGPPPPKPAERHKDDSRGLVLPGYKYLGPFNGLDKGEPVNEADAAALEHDKAYDRQLDSGDNPYLKYNHADAEFQERLKEDTSFGGNLGRAVFQAKKRVLEPLGLVEEPVKTAPGKKRPVEHSPVEPDSSSGTGKAGQQPARKRLNFGQTGDADSVPDPQPLGQPPAAPSGLGTNTMATGSGAPMADNNEGADGVGNSSGNWHCDSTWMGDRVITTSTRTWALPTYNNHLYKQISSQSGASNDNHYFGYSTPWGYFDFNRFHCHFSPRDWQRLINNNWGFRPKRLKFKLFNIQVKEVTQNDGTTTIANNLTSTVQVFTDSEYQLPYVLGSAHQGCLPPFPADVFMVPQYGYLTLNNGSQAVGRSSFYCLEYFPSQMLRTGNNFTFSYTFEDVPFHSSYAHSQSLDRLMNPLIDQYLYYLSRTDAPSGTTTQSRLQFSQAGASDIRDQSRNWLPGPCYRQQRVSKTSADNNNSEYSWTGATKYHLNGRDSLVNPGPAMASHKDDEEKFFPQSGVLIFGKQGSEKTSVDIEKVMITDEEEIRTTNPVATEQYGSVSTNLQRGNRQAATADVNTQGVLPGMVWQDRDVYLQGPIWAKIPHTDGHFHPSPLMGGFGLKHPPPQILIKNTPVPANPSTTFSAAKFASFITQYSTGQVSVEIEWELQKENSKRWNPEVQYTSNYNKSVNVDFTVDTNGVYSEPRPIGTRYLTRNL

SEQ ID NO: 589 - DNA, 2208 bp, synthetic construct
  misc_feature 1..2208: note = Description of Artificial Sequence: Synthetic polynucleotide
  source 1..2208: mol_type = other DNA
atggctgccgatggttatcttccagattggctcgaggacactctctctgaaggaataagacagtggtggaagctcaaacctggcccaccaccaccaaagcccgcagagcggcataaggacgacagcaggggtcttgtgcttcctgggtacaagtacctcggacccttcaacggactcgacaagggagagccggtcaacgaggcagacgccgcggccctcgagcacgacaaagcctatgaccggcagctcgacagcggagacaacccgtacctcaagtacaaccacgccgacgcggagtttcaggagcgccttaaagaagatacgtcttttgggggcaacctcggacgagcagtcttccaggcgaaaaagagggttcttgaacctctgggcctggttgaggaacctgttaagacggctccgggaaaaaagaggccggtagagcactctcctgtggagccagactcctcctcgggaaccggaaaggcgggccagcagcctgcaagaaaaagattgaattttggtcagactggagacgcaaactcagtacctgacccccagcctctcggacagccaccagcagccccctctggtctgggaactaatacgatggctacaggcagtggcgcaccaatggcagacaataacgagggcgccgacggagtgggtaattcctcgggaaattggcattgcgattccacatggatgggcgacagagtcatcaccaccagcacccgaacctgggccctgcccacctacaacaaccacctctacaaacaaatttccagccaatcaggagcctcgaacgacaatcactactttggctacagcaccccttgggggtattttgacttcaacagattccactgccacttttcaccacgtgactggcaaagactcatcaacaacaactggggattccgacccaagagactcaagttcaagctctttaacattcaagtcaaagaggtcacgcagaatgacggtacgacgacgattgccaataaccttaccagcacggttcaggtgtttactgactcggagtaccagctcccgtacgtcctcggctcggcgcatcaaggatgcctcccgccgttcccagcagacgtcttcatggtgccacagtatggatacctcaccctgaacaacgggagtcgggcagtaggacgctcttcattttactgcctggagtactttccttctcagatgctgcgtaccggtaacaactttaccttcagctacacttttgaggacgttcctttccacagcagctacgctcacagccagagtctggaccgtctcatgaatcctctcatcgaccagtacctgtattacttgagcagaacagacactccaagtggaaccaccacgcagtcaaggcttcagttttctcaggccggagcgagtgacattcgggaccagtctaggaactggcttcctggaccctgttaccgccagcagcgagtatcaaagacatctgcggataacaacaacagtgaatactcgtggactggagctaccaagtaccacctcaatggcagagactctctggtgaatccgggcccggccatggcaagccacaaggacgatgaagaaaagttttttcctcagagcggggttctcatctttgggaagcaaggctcagagaaaacaagtgtggacattgaaaaggtcatgattacagacgaagaggaaatcaggacgaccaatcccgtggctacggagcagtatggttctgtatctaccaacctccagagaggcaacagacaagcagctaccgcagatgtcaacacacaaggcgttcttccaggcatggtctggcaggacagagatgtgtaccttcaggggcccatctgggcaaagattccacacacggacggacattttcacccctctcccctcatgggtggattcggacttaaacaccctcctccacagattctcatcaagaacaccccggtacctgcgaatccttcgaccaccttcagtgcggcaaagtttgcttccttcatcacacagtactccacgggacaggtcagcgtggagatcgagtgggagctgcagaaggaaaacagcaaacgctggaatcccgaagttcagtacacttccaactacaacaagtctgttaatgtggactttactgtggacactaatggcgtgtatacagagcctcgccccattggcaccagatacctgactcgtaatctgtaa

SEQ ID NO: 590 - protein, 735 aa, synthetic construct
  REGION 1..735: note = Description of Artificial Sequence: Synthetic polypeptide
MAADGYLPDWLEDTLSEGIRQWWKLKPGPPPPKPAERHKDDSRGLVLPGYKYLGPFNGLDKGEPVNEADAAALEHDKAYDRQLDSGDNPYLKYNHADAEFQERLKEDTSFGGNLGRAVFQAKKRVLEPLGLVEEPVKTAPGKKRPVEHSPVEPDSSSGTGKAGQQPARKRLNFGQTGDANSVPDPQPLGQPPAAPSGLGTNTMATGSGAPMADNNEGADGVGNSSGNWHCDSTWMGDRVITTSTRTWALPTYNNHLYKQISSQSGASNDNHYFGYSTPWGYFDFNRFHCHFSPRDWQRLINNNWGFRPKRLKFKLFNIQVKEVTQNDGTTTIANNLTSTVQVFTDSEYQLPYVLGSAHQGCLPPFPADVFMVPQYGYLTLNNGSRAVGRSSFYCLEYFPSQMLRTGNNFTFSYTFEDVPFHSSYAHSQSLDRLMNPLIDQYLYYLSRTDTPSGTTTQSRLQFSQAGASDIRDQSRNWLPGPCYRQQRVSKTSADNNNSEYSWTGATKYHLNGRDSLVNPGPAMASHKDDEEKFFPQSGVLIFGKQGSEKTSVDIEKVMITDEEEIRTTNPVATEQYGSVSTNLQRGNRQAATADVNTQGVLPGMVWQDRDVYLQGPIWAKIPHTDGHFHPSPLMGGFGLKHPPPQILIKNTPVPANPSTTFSAAKFASFITQYSTGQVSVEIEWELQKENSKRWNPEVQYTSNYNKSVNVDFTVDTNGVYTEPRPIGTRYLTRNL

SEQ ID NO: 591 - DNA, 2211 bp, synthetic construct
  misc_feature 1..2211: note = Description of Artificial Sequence: Synthetic polynucleotide
  source 1..2211: mol_type = other DNA
atggctgccgatggttatcttccagattggctcgaggacactctctctgaaggaataagacagtggtggaagctcaaacctggcccaccaccaccaaagcccgcagagcggcataaggacgacagcaggggtcttgtgcttcctgggtacaagtacctcggacccttcaacggactcgacaagggagagccggtcaacgaggcagacgccgcggccctcgagcacgacaaggcctacgaccagcagctcaaagcgggtgacaatccgtacctgcggtataaccacgccgacgccgagtttcaggagcgtctgcaagaagatacgtcttttgggggcaacctcgggcgagcagtcttccaggccaagaagcgggttctcgaacctctcggtctggttgaggaaggcgctaagacggctcctggaaagaaacgtccggtagagcagtcgccacaagagccagactcctcctcgggcatcggcaagacaggccagcagcccgctaaaaagagactcaattttggtcagactggcgactcagagtcagtccccgacccacaacctctcggagaacctccagcaacccccgctgctgtgggacctactacaatggcttcaggcggtggcgcaccaatggcagacaataacgaaggcgccgacggagtgggtaatgcctcaggaaattggcattgcgattccacatggctgggcgacagagtcatcaccaccagcacccgaacatgggccttgcccacctataacaaccacctctacaagcaaatctccagtgcttcgacgggggccagcaacgacaaccactacttcggctacagcaccccctgggggtattttgactttaacagattccactgccacttttcaccacgtgactggcagcgactcatcaacaataactggggattccggcccaagagactcagcttcaagctcttcaacatccaggtcaaggaggtcacgacgaatgatggcgtcacaaccatcgctaataaccttaccagcacggttcaagtcttctcggactcggagtaccagcttccgtacgtcctcggctctgcgcaccagggctgcctccctccgttcccggcggacgtgttcatgattccgcaatacggctacctgacgctcaacaatggcagccaagccgtgggacgttcatccttttactgcctggaatatttcccttctcagatgctgagaacgggcaacaactttaccttcagctacacctttgaggaagtgcctttccacagcagctacgcgcacagccagagcctggaccggctgatgaatcctctcatcgatcaatacctgtattacctgaacagaactcaaaatcagtccggaagtgcccaaaacaaggacttgctgtttagccgtgggtctccagctggcatgtctgttcagcccaaaaactggctacctggaccctgttatcggcagcagcgcgtttctaaaacaaaaacagacaacaacaacagcaattttacctggactggtgcttcaaaatataacctcaatgggcgtgaatccatcatcaaccctggcactgctatggcctcacacaaagacgacgaagacaagttctttcccatgagcggtgtcatgatttttggaaaagagagcgccggagcttcaaacactgcattggacaatgtcatgattacggacgaagaggaaattaaagccactaaccctgtggccaccgaaagatttgggaccgtggcagtcaatttccagagcagcagcacagaccctgcgaccggagatgtgcatgctatgggagcattacctggcatggtgtggcaagatagagacgtgtacctgcagggtcccatttgggccaaaattcctcacacagatggacactttcacccgtctcctcttatgggcggctttggactcaagaacccgcctcctcagatcctcatcaaaaacacgcctgttcctgcgaatcctccggcggagttttcagctacaaagtttgcttcattcatcactcaatactccacaggacaagtgagcgtggaaattgaatgggagctgcagaaagaaaacagcaaacgctggaatcccgaagtgcagtatacatctaactatgcaaaatctgccaacgttgatttcactgtggacaacaatggactttatactgagcctcgccccattggcacccgttacctcacccgtcccctgtaa

SEQ ID NO: 592 - protein, 736 aa, synthetic construct
  REGION 1..736: note = Description of Artificial Sequence: Synthetic polypeptide
MAADGYLPDWLEDTLSEGIRQWWKLKPGPPPPKPAERHKDDSRGLVLPGYKYLGPFNGLDKGEPVNEADAAALEHDKAYDQQLKAGDNPYLRYNHADAEFQERLQEDTSFGGNLGRAVFQAKKRVLEPLGLVEEGAKTAPGKKRPVEQSPQEPDSSSGIGKTGQQPAKKRLNFGQTGDSESVPDPQPLGEPPATPAAVGPTTMASGGGAPMADNNEGADGVGNASGNWHCDSTWLGDRVITTSTRTWALPTYNNHLYKQISSASTGASNDNHYFGYSTPWGYFDFNRFHCHFSPRDWQRLINNNWGFRPKRLSFKLFNIQVKEVTTNDGVTTIANNLTSTVQVFSDSEYQLPYVLGSAHQGCLPPFPADVFMIPQYGYLTLNNGSQAVGRSSFYCLEYFPSQMLRTGNNFTFSYTFEEVPFHSSYAHSQSLDRLMNPLIDQYLYYLNRTQNQSGSAQNKDLLFSRGSPAGMSVQPKNWLPGPCYRQQRVSKTKTDNNNSNFTWTGASKYNLNGRESIINPGTAMASHKDDEDKFFPMSGVMIFGKESAGASNTALDNVMITDEEEIKATNPVATERFGTVAVNFQSSSTDPATGDVHAMGALPGMVWQDRDVYLQGPIWAKIPHTDGHFHPSPLMGGFGLKNPPPQILIKNTPVPANPPAEFSATKFASFITQYSTGQVSVEIEWELQKENSKRWNPEVQYTSNYAKSANVDFTVDNNGLYTEPRPIGTRYLTRPL

SEQ ID NO: 593 - protein, 735 aa, synthetic construct
  REGION 1..735: note = Description of Artificial Sequence: Synthetic polypeptide
MAADGYLPDWLEDTLSEGIRQWWKLKPGPPPPKPAERHKDDSRGLVLPGYKYLGPFNGLDKGEPVNEADAAALEHDKAYDRQLDSGDNPYLKYNHADAEFQERLKEDTSFGGNLGRAVFQAKKRVLEPLGLVEEPVKTAPGKKRPVEHSPVEPDSSSGTGKAGQQPARKRLNFGQTGDADSVPDPQPLGQPPAAPSGLGTNTMATGSGAPMADNNEGADGVGNSSGNWHCDSTWMGDRVITTSTRTWALPTYNNHLYKQISSQSGASNDNHYFGYSTPWGYFDFNRFHCHFSPRDWQRLINNNWGFRPKRLKFKLFNIQVKEVTQNDGTTTIANNLTSTVQVFTDSEYQLPYVLGSAHQGCLPPFPADVFMVPQYGYLTLNNGSQAVGRSSFYCLEYFPSQMLRTGNNFTFSYTFEDVPFHSSYAHSQSLDRLMNPLIDQYLYYLSRTDTPSGTTTQSRLQFSQAGASDIRNQSRNWLPGPCYRQQRVSKTSADNNNSEYSWTGATKYHLNGRDSLVNPGPAMASHKDDEEKFFPQSGVLIFGKQGSEKTSVDIEKVMITDEEEIRTTNPVATEQYGSVSTNLQRGNRQAATADVNTQGVLPGMVWQDRDVYLQGPIWAKIPHTDGHFHPSPLMGGFGLKHPPPQILIKNTPVPANPSTTFSAAKFASFITQYSTGQVSVEIEWELQKENSKRWNPEVQYTSNYNKSVNVDFTVDTNGVYSEPRPIGTRYLTRNQ

SEQ ID NO: 594 - DNA, 2208 bp, synthetic construct
  misc_feature 1..2208: note = Description of Artificial Sequence: Synthetic polynucleotide
  source 1..2208: mol_type = other DNA
atggctgccgatggttatcttccagattggctcgaggacactctctctgaaggaataagacagtggtggaagctcaaacctggcccaccaccaccaaagcccgcagagcggcataaggacgacagcaggggtcttgtgcttcctgggtacaagtacctcggacccttcaacggactcgacaagggagagccggtcaacgaggcagacgccgcggccctcgagcacgacaaagcctatgaccggcagctcgacagcggagacaacccgtacctcaagtacaaccacgccgacgcggagtttcaggaacgccttaaagaagatacgtcttttgggggcaacctcggacgagcagtcttccaggcgaaaaagagggttcttgaacctctgggcctggttgaggaacctgttaagacggctccgggaaaaaagaggccggtagagcactctcctgtggagccagactcctcctcgggaaccggaaaggcgggccagcagcctgcaagaaaaagattgaattttggtcagactggagacgcagactcagtacctgacccccagcctctcggacagccaccagcagccccctctggtctgggaactaatacgatggctacaggcagtggcgcaccaatggcagacaataacgagggcgccgacggagtgggtaattcctcgggaaattggcattgcgattccacatggatgggcgacagagtcatcaccaccagcacccgaacctgggccctgcccacctacaacaaccacctctacaaacaaatttccagccaatcaggagcctcgaacgacaatcactactttggctacagcaccccttgggggtattttgacttcaacagattccactgccacttttcaccacgtgactggcaaagactcatcaacaacaactggggattccgacccaagagactcaagttcaagctctttaacattcaagtcaaagaggtcacgcagaatgacggtacgacgacgattgccaataaccttaccagcacggttcaggtgtttactgactcggagtaccagctcccgtacgtcctcggctcggcgcatcaaggatgcctcccgccgttcccagcagacgtcttcatggtgccacagtatggatacctcaccctgaacaacgggagtcaggcagtaggacgctcttcattttactgcctggagtactttccttctcagatgctgcgtaccggtaacaactttaccttcagctacacttttgaggacgttcctttccacagcagctacgctcacagccagagtctggaccgtctcatgaatcctctcatcgaccagtacctgtattacttgagcagaacagacactccaagtggaaccaccacgcagtcaaggcttcagttttctcaggccggagcgagtgacattcggaaccagtctaggaactggcttcctggaccctgttaccgccagcagcgagtatcaaagacatctgcggataacaacaacagtgaatactcgtggactggagctaccaagtaccacctcaatggcagagactctctggtgaatccgggcccggccatggcaagccacaaggacgatgaagaaaagttttttcctcagagcggggttctcatctttgggaagcaaggctcagagaaaacaagtgtggacattgaaaaggtcatgattacagacgaagaggaaatcaggacaaccaatcccgtggctacggagcagtatggttctgtatctaccaacctccagagaggcaacagacaagcagctaccgcagatgtcaacacacaaggcgttcttccaggcatggtctggcaggacagagatgtgtaccttcaggggcccatctgggcaaagattccacacacggacggacattttcacccctctcccctcatgggtggattcggacttaaacaccctcctccacagattctcatcaagaacaccccggtacctgcgaatccttcgaccaccttcagtgcggcaaagtttgcttccttcatcacacagtactccacgggacaggtcagcgtggagatcgagtgggagctgcagaaggaaaacagcaaacgctggaatcccgaagttcagtacacttccaactacaacaagtctgttaatgtggactttactgtggacactaatggcgtgtattcagagcctcgccccattggcaccagatacctgactcgtaatcagtaa

SEQ ID NO: 595 - DNA, 2208 bp, synthetic construct
  misc_feature 1..2208: note = Description of Artificial Sequence: Synthetic polynucleotide
  source 1..2208: mol_type = other DNA
atggctgccgatggttatcttccagattggctcgaggacactctctctgaaggaataagacagtggtggaagctcaaacctggcccaccaccaccaaagcccgcagagcggcataaggacgacagcaggggtcttgtgcttcctgggtacaagtacctcggacccttcaacggactcgacaagggagagccggtcaacgaggcagacgccgcggccctcgagcacgacaaagcctatgaccggcagctcgacagcggagacaacccgtacctcaagtacaaccacgccgacgcggagtttcaggagcgccttaaagaagatacgtcttttgggggcaacctcggacgagcagtcttccaggcgaaaaagagggttcttgaacctctgggcctggttgaggaacctgttaagacggctccgggaaaaaagaggccggtagagcactctcctgtggagccagactcctcctcgggaaccggaaaggcgggccagcagcctgcaagaaaaagattgaattttggtcagactggagacgcagactcagtacctgatccccagcctctcggacagccaccagcagccccctctggtctgggaactaatacgatggctacaggcagtggcgcaccaatggcagacaataacgagggcgccgacggagtgggtaattcctcgggaaattggcattgcgattccacatggatgggcgacagagtcatcaccaccagcacccgaacctgggccctgcccacctacaacaaccacctctacaaacaaatttccagccaatcaggagcctcgaacgacaatcactactttggctacagcaccccttgggggtattttgacttcaacagattccactgccacttttcaccacgtgactggcaaagactcatcaacaacaactggggattccgacccaagagactcaagttcaagctctttaacattcaagtcaaagaggtcacgcagaatgacggtacgacgacgattgccaataaccttaccagcacggttcaggtgtttactgactcggagtaccagctcccgtatgtcctcggctcggcgcatcaaggatgcctcccgccgttcccagcagacgtcttcatggtgccacagtatggatacctcaccctgaacaacgggagtcaggcagtaggacgctcttcattttactgcctggagtactttccttctcagatgctgcgtaccggtaacaactttaccttcagctacacttttgaggacgttcctttccacagcagctacgctcacagccagagtctggaccgtctcatgaatcctctcatcgaccagtacctgtattacttgagcagaacagacactccaagtggaaccaccacgcagtcaaggcttcagttttctcaggccggagcgagtgacattcgggaccagtctaggaactggcttcctggaccctgttaccgccagcagcgagtatcaaagacatctgcggataacaacaacagtgaatactcgtggactggagctaccaagtaccacctcaatggcagagactctctggtgaatccgggcccggccatggcaagccacaaggacgatgaagaaaagttttttcctcagagcggggttctcatctttgggaagcaaggctcagagaaaacaagtgtggacattgaaaaggtcatgattacagacgaagaggaaatcaggacaaccaatcccgtggctacggagcagtatggttctgtatctaccaacctccagagaggcaacagacaagcagctaccgcagatgtcaacacacaaggcgttcttccaggcatggtctggcaggacagagatgtgtaccttcaggggcccatctgggcaaagattccacacacggacggacattttcacccctctcccctcatgggtggattcggacttaaacaccctcctccacagattctcatcaagaacaccccggtacctgcgaatccttcgaccaccttcagtgcggcaaagtttgcttccttcatcacacagtactccacgggacaggtcagcgtggagatcgagtgggagctgcagaaggaaaacagcaaacgctggaatcccgaagttcagtacacttccaactacaacaagtctgttaatgtggactttactgtggacactaatggcgtgtattcagagcctcgccccattggcaccagatacctgactcgtaatctgtaa

SEQ ID NO: 596 - protein, 735 aa, synthetic construct
  REGION 1..735: note = Description of Artificial Sequence: Synthetic polypeptide
MAADGYLPDWLEDTLSEGIRQWWKLKPGPPPPKPAERHKDDSRGLVLPGYKYLGPFNGLDKGEPVNEADAAALEHDKAYDRQLDSGDNPYLKYNHADAEFQERLKEDTSFGGNLGRAVFQAKKRVLEPLGLVEEPVKTAPGKKRPVEHSPVEPDSSSGTGKAGQQPARKRLNFGQTGDADSVPDPQPLGQPPAAPSGLGTNTMATGSGAPMADNNEGADGVGNSSGNWHCDSTWMGDRVITTSTRTWALPTYNNHLYKQISSQSGASNDNHYFGYSTPWGYFDFNRFHCHFSPRDWQRLINNNWGFRPKRLKFKLFNIQVKEVTQNDGTTTIANNLTSTVQVFTDSEYQLPYVLGSAHQGCLPPFPADVFMVPQYGYLTLNNGSQAVGRSSFYCLEYFPSQMLRTGNNFTFSYTFEDVPFHSSYAHSQSLDRLMNPLIDQYLYYLSRTDTPSGTTTQSRLQFSQAGASDIRDQSRNWLPGPCYRQQRVSKTSADNNNSEYSWTGATKYHLNGRDSLVNPGPAMASHKDDEEKFFPQSGVLIFGKQGSEKTSVDIEKVMITDEEEIRTTNPVATEQYGSVSTNLQRGNRQAATADVNTQGVLPGMVWQDRDVYLQGPIWAKIPHTDGHFHPSPLMGGFGLKHPPPQILIKNTPVPANPSTTFSAAKFASFITQYSTGQVSVEIEWELQKENSKRWNPEVQYTSNYNKSVNVDFTVDTNGVYSEPRPIGTRYLTRNL

SEQ ID NO: 597 - DNA, 2601 bp, synthetic construct
  misc_feature 1..2601: note = Description of Artificial Sequence: Synthetic polynucleotide
  source 1..2601: mol_type = other DNA
ccatcgacgtcagacgcggaagcttcgatcaactacgcggacaggtaccaaaacaaatgttctcgtcacgtgggcatgaatctgatgctgtttccctgcagacaatgcgagagactgaatcagaattcaaatatctgcttcactcacggtgtcaaagactgtttagagtgctttcccgtgtcagaatctcaacccgtttctgtcgtcaaaaaggcgtatcagaaactgtgctacattcatcacatcatgggaaaggtgccagacgcttgcactgcttgcgacctggtcaatgtggacttggatgactgtgtttctgaacaataaatgacttaaaccaggtatgactgccgatggttatcttccagattggctcgaggacaaccttagtgaaggaattcgcgagtggtgggctttgaaacctggagcccctcaacccaaggcaaatcaacaacatcaagacaacgctcgaggtcttgtgcttccgggttacaaataccttggacccggcaacggactcgacaagggggagccggtcaacgcagcagacgcggcggccctcgagcacgacaaggcctacgaccagcagctcaaggccggagacaacccgtacctcaagtacaaccacgccgacgccgagttccaggagcggctcaaagaagatacgtcttttgggggcaacctcgggcgagcagtcttccaggccaaaaagaggcttcttgaacctcttggtctggttgaggaagcggctaagacggctcctggaaagaagaggcctgtagagcagtctcctcaggaaccggactcctccgcgggtattggcaaatcgggtgcacagcccgctaaaaagagactcaatttcggtcagactggcgacacagagtcagtcccagaccctcaaccaatcggagaacctcccgcagccccctcaggtgtgggatctcttacaatggcttcaggtggtggcgcaccagtggcagacaataacgaaggtgccgatggagtgggtagttcctcgggaaattggcattgcgattcccaatggctgggggacagagtcatcaccaccagcacccgaacctgggccctgcccacctacaacaatcacctctacaagcaaatctccaacagcacatctggaggatcttcaaatgacaacgcctacttcggctacagcaccccctgggggtattttgacttcaacagattccactgccacttctcaccacgtgactggcagcgactcatcaacaacaactggggattccggcctaagcaactcaacttcaagctcttcaacattcaggtcaaagaggttacggacaacaatggagtcaagaccatcgccaataaccttaccagcacggtccaggtcttcacggactcagactatcagctcccgtacgtgctcgggtcggctcacgagggctgcctcccgccgttcccagcggacgttttcatgattcctcagtacgggtatctgacgcttaatgatggaagccaggccgtgggtcgttcgtccttttactgcctggaatatttcccgtcgcaaatgctaagaacgggtaacaacttccagttcagctacgagtttgagaacgtacctttccatagcagctacgctcacagccaaagcctggaccgactaatgaatccactcatcgaccaatacttgtactatctctcaaagactattaacggttctggacagaatcaacaaacgctaaaattcagtgtggccggacccagcaacatggctgtccagggaagaaactacatacctggacccagctaccgacaacaacgtgtctcaaccactgtgactcaaaacaacaacagcgaatttgcttggcctggagcttcttcttgggctctcaatggacgtaatagcttgatgaatcctggacctgctatggccagccacaaagaaggagaggaccgtttctttcctttgtctggatctttaatttttggcaaacaaggaactggaagagacaacgtggatgcggacaaagtcatgataaccaacgaagaagaaattaaaactactaacccggtagcaacggagtcctatggacaagtggccacaaaccaccagagtgcccaagcacaggcgcagaccggctgggttcaaaaccaaggaatacttccgggtatggtttggcaggacagagatgtgtacctgcaaggacccatttgggccaaaattcctcacacggacggcaactttcacccttctccgctgatgggagggtttggaatgaagcacccgcctcctcagatcctcatcaaaaacacacctgtacctgcggatcctccaacggccttcaacaaggacaagctgaactctttcatcacccagtattctactggccaagtcagcgtggagatcgagtgggagctgcagaaggaaaacagcaagcgctggaacccggagatccagtacacttccaactattacaagtctaataatgttgaatttgctgttaatactgaaggtgtatatagtgaaccccgccccattggcaccagatacctgactcgtaatctgtaattgcttgttaatcaataaaccgtttaattcgtttcagttgaactgcggcc

SEQ ID NO: 598 - DNA, 2601 bp, synthetic construct
  misc_feature 1..2601: note = Description of Artificial Sequence: Synthetic polynucleotide
  source 1..2601: mol_type = other DNA
ccatcgacgtcagacgcggaagcttcgatcaactacgcggacaggtaccaaaacaaatgttctcgtcacgtgggcatgaatctgatgctgtttccctgcagacaatgcgagagactgaatcagaattcaaatatctgcttcactcacggtgtcaaagactgtttagagtgctttcccgtgtcagaatctcaacccgtttctgtcgtcaaaaaggcgtatcagaaactgtgctacattcatcacatcatgggaaaggtgccagacgcttgcactgcttgcgacctggtcaatgtggacttggatgactgtgtttctgaacaataaatgacttaaaccaggtatggctgccgatggttatcttccagattggctcgaggacaaccttagtgaaggaattcgcgagtggtgggctttgaaacctggagcccctcaacccaaggcaaatcaacaacatcaagacaacgctcgaggtcttgtgcttccgggttacaaataccttggacccggcaacggactcgacaagggggagccggtcaacgcagcagacgcggcggccctcgagcacgacaaggcctacgaccagcagctcaaggccggagacaacccgtacctcaagtacaaccacgccgacgccgagttccaggagcggctcaaagaagatacgtcttttgggggcaacctcgggcgagcagtcttccaggccaaaaagaggcttcttgaacctcttggtctggttgaggaagcggctaagacggctcctggaaagaagaggcctgtagagcagtctcctcaggaaccggactcctccgcgggtattggcaaatcgggtgcacagcccgctaaaaagagactcaatttcggtcagactggcgacacagagtcagtcccagaccctcaaccaatcggagaacctcccgcagccccctcaggtgtgggatctcttacaatggcttcaggtggtggcgcaccagtggcagacaataacgaaggtgccgatggagtgggtagttcctcgggaaattggcattgcgattcccaatggctgggggacagagtcatcaccaccagcacccgaacctgggccctgcccacctacaacaatcacctctacaagcaaatctccaacagcacatctggaggatcttcaaatgacaacgcctacttcggctacagcaccccctgggggtattttgacttcaacagattccactgccacttctcaccacgtgactggcagcgactcatcaacaacaactggggattccggcctaagcgactcaacttcaagctcttcaacattcaggtcaaagaggttacggacaacaatggagtcaagaccatcgccaataaccttaccagcacggtccaggtcttcacggactcagactatcagctcccgtacgtgctcgggtcggctcacgagggctgcctcccgccgttcccagcggacgttttcatgattcctcagtacgggtatctgacgcttaatgatggaagccaggccgtgggtcgttcgtccttttactgcctggaatatttcccgtcgcaaatgctaagaacgggtaacaacttccagttcagctacgagtttgagaacgtacctttccatagcagctacgctcacagccaaagcctggaccgactaatgaatccactcatcgaccaatacttgtactatctctcaaagactattaacggttctggacagaatcaacaaacgctaaaattcagtgtggccggacccagcaacatggctgtccagggaagaaactacatacctggacccagctaccgacaacaacgtgtctcaaccactgtgactcaaaacaacaacagcgaatttgcttggcctggggcttcttcttgggctctcaatggacgtaatagcttgatgaatcctggacctgctatggccagccacaaagaaggagaggaccgtttctttcctttgtctggatctttaatttttggcaaacaaggaactggaagagacaacgtggatgcggacaaagtcatgataaccaacgaagaagaaattaaaactactaacccggtagcaacggagtcctatggacaagtggccacaaaccaccagagtgcccaagcacaggcgcagaccggctgggttcaaaaccaaggaatacttccgggtatggtttggcaggacagagatgtgtacctgcaaggacccatttgggccaaaattcctcacacgggcggcaactttcacccttctccgctgatgggagggtttggaatgaagcacccgcctcctcagatcctcatcaaaaacacacctgtacctgcggatcctccaacggccttcaacaaggacaagctgaactctttcatcacccagtattctactggccaagtcagcgtggagatcgagtgggagctgcagaaggaaaacagcaagcgctggaacccggagatccagtacacttccaactattacaagtctaataatgttgaatttgctgttaatactggaggtgtatatagtgaaccccgccccattggcaccagatacctgactcgtaatctgtaattgcttgttaatcaataaaccgtttaattcgtttcagttgaactgcggcc

SEQ ID NO: 599 - DNA, 2601 bp, synthetic construct
  misc_feature 1..2601: note = Description of Artificial Sequence: Synthetic polynucleotide
  source 1..2601: mol_type = other DNA
ccatcgacgtcagacgcggaagcttcgatcaactacgcggacaggtaccaaaacaaatgttctcgtcacgtgggcatgaatctgatgctgtttccctgcagacaatgcgagagactgaatcagaattcaaatatctgcttcactcacggtgtcaaagactgtttagagtgctttcccgtgtcagaatctcaacccgtttctgtcgtcaaaaaggcgtatcagaaactgtgctacattcatcacatcatgggaaaggtgccagacgcttgcactgcttgcgacctggtcaatgtggactcggatgactgtgtttctgaacaataaatgacttaaaccaggtatggctgccgatggttatcttccagattggctcgaggacaaccttagtgaaggaattcgcgagtggtgggctttgaaacctggagcccctcaacccaaggcaaatcaacaacatcaagacaacgctcgaggtcttgtgcttccgggttacaaataccttggacccggcaacggactcgacaagggggagccggtcaacgcagcagacgcggcggccctcgagcacgacaaggcctacgaccagcagctcaaggccggagacaacccgtacctcaagtacaaccacgccgacgccgagttccaggagcggctcaaagaagatacgtcttttgggggcaacctcgggcgagcagtcttccaggccaaaaagaggcttcttgaacctcttggtctggttgaggaagcggctaagacggctcctggaaagaagaggcctgtagagcagtctcctcaggaaccggactcctccgcgggtattgacaaatcgggtgcacagcccgctaaaaagagactcaatttcggtcagactggcgacacagagtcagtcccagaccctcaaccaatcggagaacctcccgcagccccctcaggtgtgggatctcttacaatggcttcaggtggtggcgcaccagtggcagacaataacgaaggtgccgatggagtgggtagttcctcgggaaattggcattgcgattcccaatggctgggggacagagtcatcaccaccagcacccgaacctgggccctgcccacctacaacaatcacctctacaagcaaatctccaacagcacatctggaggatcttcaaatgacaacgcctacttcggctacagcaccccctgggggtattttgacttcaacagattccactgccacttctcaccacgtgactggcagcgactcatcaacaacaactggggattccggcctaagcgactcaacttcaagctcttcaacattcaggtcaaagaggttacggacaacaatggagtcaagaccatcgccaataaccttaccagcacggtccaggtcttcacggactcggactatcagctcccgtacgtgctcgggtcggctcacgagggctgcctcccgccgttcccagcggacgttttcatgattcctcagtacgggtatctgacgcttaatgatggaagccaggccgtgggtcgttcgtccttttactgcctggaatatttcccgtcgcaaatgctaagaacgggtaacaacttccagttcagctacgagtttgagaacgtacctttccatagcagctacgctcacagccaaagcctggaccgactaatgaatccactcatcgaccaatacttgtactatctctcaaagactattaacggttctggacagaatcaacaaacgctaaaattcagtgtggccggacccagcaacatggctgtccagggaagaaactacatacctggacccagctaccgacaacaacgtgtctcaaccactgtgactcaaaacaacaacagcgaatttgcttggcctggagcttcttcttgggctctcaatggacgtaatagcttgatgaatcctggacctgctatggccagccacaaagaaggagaggaccgtttctttcctttgtctggatctttaatttttggcaaacaaggaactggaagagacaacgtggatgcggacaaagtcatgataaccaacgaagaagaaattaaaactactaacccggtagcaacggagtcctatggacaagtggccacaaaccaccagagtgcccaagcacaggcgcagaccggctgggttcaaaaccaaggaatacttccgggtatggtttggcaggacagagatgtgtacctgcaaggacccatttgggccaaaattcctcacacggacggcaactttcacccttctccgctgatgggagggtttggaatgaagcacccgcctcctcagatcctcatcaaaaacacacctgtacctgcggatcctccaacggccttcaacaaggacaagctgaactctttcatcacccagtattctactggccaagtcagcgtggagatcgagtgggagctgcagaaggaaaacagcaagcgctggaacccggagatccagtacacttccaactattacaagtctaataatgttgaatttgctgttaatactgaaggtgtatatagtgaaccccgccccattggcaccagatacctgactcgtaatctgtaattgcttgttaatcaataaaccgtttaattcgtttcagttgaactgcggcc

SEQ ID NO: 600 - DNA, 2601 bp, synthetic construct
  misc_feature 1..2601: note = Description of Artificial Sequence: Synthetic polynucleotide
  source 1..2601: mol_type = other DNA
ccatcgacgtcagacgcggaagcttcgatcaactacgcggacaggtaccaaaacaaatgttctcgtcacgtgggcatgaatctgatgctgtttccctgcagacaatgcgagagactgaatcagaattcaaatatctgcttcactcacggtgtcaaagactgtttagagtgctttcccgtgtcagaatctcaacccgtttctgtcgtcaaaaaggcgtatcagaaactgtgctacattcatcacatcatgggaaaggtgccagacgcttgcactgcttgcgacctggtcaatgtggacttggatgactgtgtttctgaacaataaatgacttaaaccaggtatggctgccgatggttatcttccagattggctcgaggacaaccttagtgaaggaattcgcgagtggtgggctttgaaacctggagcccctcaacccaaggcaaatcaacaacatcaagacaacgctcgaggtcttgtgcttccgggttacaaataccttggacccggcaacggactcgacaagggggagccggtcaacgcagcagacgcggcggccctcgagcacgacaaggcctacgaccagcagctcaaggccggagacaacccgtacctcaagtacaaccacgccgacgccgagttccaggagcggctcaaagaagatacgtcttttgggggcaacctcgggcgagcagtcctccaggccaaaaagaggcttcttgaacctcttggtctggttgaggaagcggctaagacggctcctggaaagaagaggcctgtagagcagtctcctcaggaaccggactcctccgcgggtattggcaaatcgggtgcacagcccgctaaaaagagactcaatttcggtcagactggcgacacagagtcagtcccagaccctcaaccaatcggagaacctcccgcagccccctcaggtgtgggatctcttacaatggcttcaggtggtggcgcaccagtggcagacaataacgaaggtgccgatggagtgggtagttcctcgggaaattggcattgcgattcccaatggctgggggacagagtcatcaccaccagcacccgaacctgggccctgcccacctacaacaatcacctctacaagcaaatctccaacagcacatctggaggatcttcaaatgacaacgcctacttcggctacagcaccccctgggggtattttgacttcaacagattccactgccacttctcaccacgtgactggcagcgactcatcaacaacaactggggattccggcctaagcgactcaacttcaagctcttcaacattcaggtcaaagaggttacggacaacaatggagtcaagaccatcgccaataaccttaccagcacggtccaggtcttcacggactcagactatcagctcccgtacgtgctcgggtcggctcacgagggctgcctcccgccgttcccagcggacgttttcatgattcctcagtacgggtatctgacgcttaatgatggaagccaggccgtgggtcgttcgtccttttactgcctggaatatttcccgtcgcaaatgctaagaacgggtaacaacttccagttcagctacgagtttgagaacgtacctttccatagcagctacgctcacagccaaagcctggaccgactaatgaatccactcatcgaccaatacttgtactatctctcaaagactattaacggttctggacagaatcaacaaacgctaaaattcagtgtggccggatccagcaacatggctgtccagggaagaaactacatacctggacccagctaccgacaacaacgtgtctcaaccactgtgactcaaaacaacaacagcgaatttgcttggcctggagcttcttcttgggctctcaatggacgtaatagcttgatgaatcctggacctgctatggccagccacaaagaaggagaggaccgtttctttcctttgtctggatctttaatttttggcaaacaaggaactggaagagacaacgtggatgcggacaaagtcatgataaccaacgaagaagaaattaaaactactaacccggtagcaacggagtcctatggacaagtggccacaaaccaccagagtgcccaagcacaggcgcagaccggctgggttcaaaaccaaggaatacttccaggtatggtttggcaggacagagatgtgtacctgcaaggacccatttgggccaaaattcctcacacggacggcaactttcacccttctccgctgatgggagggtttggaatgaagcacccgcctcctcagatcctcatcaaaaacacacctgtacctgcggatcctccaacggccttcaacaaggacaagctgaactctttcatcacccagtattctactggccaagtcagcgtggagatcgagtgggagctgcagaaggaaaacagcaagcgctggaacccggagatccagtacacttccaactattacaagtctaataatgttgaatttgctgttaatactgaaggtgtatatagtgaaccccgccccattggcaccagatacctgactcgtaatctgtaattgcttgttaatcaataaaccgtttaattcgtttcagttgaactgcggcc

SEQ ID NO: 601 - DNA, 2601 bp, synthetic construct
  misc_feature 1..2601: note = Description of Artificial Sequence: Synthetic polynucleotide
  source 1..2601: mol_type = other DNA
ccatcgacgtcagacgcggaagcttcgatcaactacgcggacaggtaccaaaacaaatgttctcgtcacgtgggcatgaatctgatgctgtttccctgcagacaatgcgagagactgaatcagaattcaaatatctgcttcactcacggtgtcaaagactgtttagagtgctttcccgtgtcagaatctcaacccgtttctgtcgtcaaaaaggcgtatcagaaactgtgctacattcatcacatcatgggaaaggtgccagacgcttgcactgcttgcgacctggtcaatgtggacttggatgactgtgtttctgaacaataaatgacttaaaccaggtatggctgccgatggttatcttccagattggctcgaggacaaccttagtgaaggaattcgcgagtggtgggctttgaaacctggagcccctcaacccaaggcaaatcaacaacatcaagacaacgctcgaggtcttgtgcttccgggttacaaataccttggacccggcaacggactcgacaagggggagccggtcaacgcagcagacgcggcggccctcgagcacgacagggcctacgaccagcagctcaaggccggagacaacccgtacctcaagtacaaccacgccgacgccgagttccaggagcggctcaaagaagatacgtcttttgggggcaacctcgggcgagcagtcttccaggccaaaaagaggcttcttgaacctcttggtctggttgaggaagcggctaagacggctcctggaaagaagaggcctgtagagcagtctcctcaggaaccggactcctccgcgggtattggcaaatcgggtgcacagcccgctaaaaagagactcaatttcggtcagactggcgacacagagtcagtcccagaccctcaaccaatcggagaacctcccgcagccccctcaggtgtgggatctcttacaatggcttcaggtggtggcgcaccagtggcagacaataacgaaggtgccgatggagtgggtagttcctcgggaaattggcattgcgattcccaatggctgggggacagagtcatcaccaccagcacccgaacctgggccctgcccacctacaacaatcacctctacaagcaaatctccaacagcacatctggaggatcttcaaatgacaacgcctacttcggctacagcaccccctgggggtattttgacttcaacagattccactgccacttctcaccacgtgactggcagcgactcatcaacaacaactggggattccggcctaagcgactcaacttcaagctcttcaacattcaggtcaaagaggttacggacaacaatggagtcaagaccatcgccaataaccttaccagcacggtccaggtcttcacggactcagactatcagctcccgtacgtgctcgggtcggctcacgagggctgcctcccgccgttcccagcggacgttttcatgattcctcagtacgggtatctgacgcttaatgatggaagccaggccgtgggtcgttcgtccttttactgcctggaatatttcccgtcgcaaatgctaagaacgggtaacaacttccagttcagctacgagtttgagaacgtacctttccatagcagctacgctcacagccaaagcctggaccgactaatgaatccactcatcgaccaatacttgtactatctctcaaagactattaacggttctggacagaatcaacaaacgctaaaattcagtgtggccggacctagcaacatggctgtccagggaagaaactacatacctggacccagctaccgacaacaacgtgtctcaaccactgtgactcaaaacaacaacagcgaatttgcttggcctggagcttcttcttgggctctcaatggacgtaatagcttgatgaatcctggacctgctatggccagccacaaagaaggagaggaccgtttctttcctttgtctggatctttaatttttggcaaacaaggaactggaagagacaacgtggatgcggacaaagtcatgataaccaacgaagaagaaattaaaactactaacccggtagcaacggagtcctatggacaagtggccacaaaccaccagagtgcccaagcacaggcgcagaccggctgggttcaaaaccaaggaatacttccgggtatggtttggcaggacagagatgtgtacctgcaaggacccatttgggccaaaattcctcacacggacggcaactttcacccttctccgctgatgggagggtttggaatgaagcacccgcctcctcagatcctcatcaaaaacacacctgtacctgcggatcctccaacggccttcaacaaggacaagctgaactctttcatcacccagtattctactggccaagtcagcgtggagatcgagtgggagctgcagaagaaaaacagcaagcgctggaacccggagatccagtacacttccaactattacaagtctaataatgttgaatttgctgttaacactgaaggtgtatatagtgaaccccgccccattggcaccagatacctgactcgtaatctgtaattgcttgttaatcaataaaccgtttaattcgtttcagttgaactgcggcc

SEQ ID NO: 602 - DNA, 2601 bp, synthetic construct
  misc_feature 1..2601: note = Description of Artificial Sequence: Synthetic polynucleotide
  source 1..2601: mol_type = other DNA
ccatcgacgtcagacgcggaagcttcgatcaactacgcggacaggtaccaaaacaaatgttctcgtcacgtgggcatgaatctgatgctgtttccctgcagacaatgcgagagactgaatcagaattcaaatatctgcttcactcacggtgtcaaagactgtttagagtgctttcccgtgtcagaatctcaacccgtttctgtcgtcaaaaaggcgtatcagaaactgtgctacattcatcacatcatgggaaaggtgccagacgcttgcactgcttgcgacctggtcaatgtggacttggatgactgtgtttctgaacaataaatgacttaaaccaggtatggctgccgatggttatcttccagattggctcgaggacaaccttagtgaaggaattcgcgagtggtgggctttgaaacctggagcccctcaacccaaggcaaatcaacaacatcaagacaacgctcgaggtcttgtgcttccgggttacaaataccttggacccggcaacggactcgacaagggggagccggtcaacgcagcagacgcggcggccctcgagcacgacaaggcctacgaccagcagctcaaggccggagacaacccgtacctcaagtacaaccacgccgacgccgagttccaggagcggctcaaagaagatacgtcttttgggggcaacctcgggcgagcagtcttccaggccaaaaagaggcttcttgaacctcttggtctggttgaggaagcggctaagacggctcctggaaagaagaggcctgtagagcagtctcctcaggaaccggactcctccgcgggtattggcaaatcgggtgcacagcccgctaaaaagagactcaatttcggtcagactggcgacacagagtcagtcccagaccctcaaccaatcggagaacctcccgcagccccctcaggtgtgggatctcttacaatggcttcaggtggtggcgcaccagtggcagacaataacgaaggtgccgatggagtgggtagttcctcgggaaattggcattgcgattcccaatggctgggggacagagtcatcaccaccagcacccgaacctgggccctgcccacctacaacaatcacctctacaagcaaatctccaacagcacatctggaggatcttcaaatgacaacgcctacttcggctacagcaccccctgggggtattttgacttcaacagattccactgccacttctcaccacgtgactggcagcgactcatcaacaacaactggggattccggcctaagcgactcaacttcaagctcttcaacattcaggtcaaagaggttacggacaacaatggagtcaagaccatcgccaataaccttaccagcacggtccaggtcttcacggactcagactatcagctcccgtacgtgctcgggtcggctcacgagggctgcctcccgccgttcccagcggacgttttcatgattcctcagtacgggtatctgacgcttaatgatggaagccaggccgtgggtcgttcgtccttttactgcctggaatatttcccgtcgcaaatgctaagaacgggtaacaacttccagttcagctacgagtttgagaacgtacctttccatagcagctacgctcacagccaaagcctggaccgactaatgaatccactcatcgaccaatacttgtactatctctcaaagactattaacggttctggacagaatcaacaaacgctaaaattcagtgtggccggacccagcaacatggctgtccagggaagaaactacatacctggacccagctaccgacaacaacgtgtctcaaccactgtgactcaaaacaacaacagcgaatttgcttggcctggagcttcttcttgggctctcaatggacgtaatagcttgatgaatcctggacctgctatggccagccacaaagaaggagaggaccgtttctttcctttgtctggatctttaatttttggcaaacaaggaactggaagagacaacgtggatgcggacaaagtcatgataaccaacgaagaagaaattaaaactactaacccggtagcaacggagtcctatggacaagtggccacaaaccaccagagtgcccaagcacgggcgcagaccggctgggttcaaaaccaaggaatacttccgggtatggtttggcaggacagagatgtgtacctgcaaggacccatttgggccaaaattcctcacacggacggcaactttcacccttctccgctgatgggagggtttggaatgaagcacccgcctcctcagatcctcatcaaaaacacacctgtacctgcggatcctccaacggccttcaacaaggacaagctgaactctttcatcacccagtattctactggccaagtcagcgtggagatcgagtgggagctgcagaaggaaaacagcaagcgctggaacccggagatccagtacacttccaactattacaagtctaataatgttgaatttgctgttaatactgaaggtgtatatagtgaaccccgccccattggcaccagatacctgactcgtaatctgtaattgcttgttaatcaataaaccgtttaattcgtttcagttgaactgcggcc

SEQ ID NO: 603 - DNA, 2601 bp, synthetic construct
  misc_feature 1..2601: note = Description of Artificial Sequence: Synthetic polynucleotide
  source 1..2601: mol_type = other DNA
ccatcgacgtcagacgcggaagcttcgatcaactacgcggacaggtaccaaaacaaatgttctcgtcacgtgggcatgaatctgatgctgtttccctgcagacaatgcgagagactgaatcagaattcaaatatctgcttcactcacggtgtcaaagactgtttagagtgctttcccgtgtcagaatctcaacccgtttctgtcgtcaaaaaggcgtatcagaaactgtgctacattcatcacatcatgggaaaggtgccagacgcttgcactgcttgcgacctggtcaatgtggacttggatgactgtgtttctgaacaataaatgacttaaaccaggtatggctgccgatggttatcttccagattggctcgaggacaaccttagtgaaggaattcgcgagtggtgggctttgaaacctggagcccctcaacccaaggcaaatcaacaacatcaagacaacgctcgaggtcttgtgcttccgggttacaaataccttggacccggcaacggactcgacaagggggagccggtcaacgcagtagacgcggcggccctcgagcacgacaaggcctacgaccagcagctcaaggccggagacaacccgtacctcaagtacaaccacgccgacgccgagttccaggagcggctcaaagaagatacgtcttttgggggcaacctcgggcgagcagtcttccaggccaaaaagaggcttcttgaacctcttggtctggttgaggaagcggctaagacggctcctggaaagaagaggcctgtagagcagtctcctcaggaaccggactcctccgcgggtattggcaaatcgggtgcacagcccgctaaaaagagactcaatttcggtcagactggcgacacagagtcagtcccagaccctcaaccaatcggagaacctcccgcagccccctcaggtgtgggatctcttacaatggcttcaggtggtggcgcaccagtggcagacaataacgaaggtgccgatggagtgggtagttcctcgggaaattggcattgcgattcccaatggctgggggacagagtcatcaccaccagcacccgaacctgggccctgcccacctacaacaatcacctctacaagcaaatctccaacagcacatctggaggatcttcaaatgacaacgcctacttcggctacagcaccccctgggggtattttgacttcaacagattccactgccacttctcaccacgtgactggcagcgactcatcaacaacaactggggatttcggcctaagcgactcaacttcaagctcttcaacattcaggtcaaagaggttacggacaacaatggagtcaagaccatcgccaataaccttaccagcacggtccaggtcttcacggactcagactatcagctcccgtacgtgctcgggtcggctcacgagggctgcctcccgccgttcccagcggacgttttcatgattcctcagtacgggtatctgacgcttaatgatggaagccaggccgtgggtcgttcgtccttttactgcctggaatatttcccgtcgcaaatgctaagaacgggtaacaacttccagttcagctacgagtttgagaacgtacctttccatagcagctacgctcacagccaaagcctggaccgactaatgaatccactcatcgaccaatacttgtactatctctcaaagactattaacggttctggacagaatcaacaaacgctaaaattcagtgtggccggacccagcaacatggctgtccagggaagaaactacatacctggacccagctaccgacaacaacgtgtctcaaccactgtgactcaaaacaacaacagcgaatttgcttggcctggagcttcttcttgggctctcaatggacgtaatagcttgatgaatcctggacctgctatggccagccacaaagaaggagaggaccgtttctttcctttgtctggatctttaatttttggcaaacaaggaactggaagagacaacgtggatgcggacaaagtcatgataaccaacgaagaagaaattaaaactactaacccggtagcaacggagtcctatggacaagtggccacaaaccaccagagtgcccaagcacaggcgcagaccggctgggttcaaaaccaaggaatacttccgggtatggtttggcaggacagagatgtgtacctgcaaggacccatttgggccaaaattcctcacacggacggcaactttcacccttctccgctgatgggagggtttggaatgaagcacccgcctcctcagatcctcatcaaaaacacacctgtacctgcggatcctccaacggccttcaacaaggacaagctgaactctttcatcacccagtattctactggccaagtcagcgtggagatcgagtgggagctgcagaaggaaaacagcaagcgctggaacccggagatccagtacacttccaactattacaagtctaataatgttgaatttgctgttaatactgaaggtgtatatagtgaaccccgccccattggcaccagatacctgactcgtaatctgtaattgcttgttaatcaataaaccgtttaattcgtttcagttgaactgcggcc

SEQ ID NO: 604 - DNA, 2580 bp, synthetic construct
  misc_feature 1..2580: note = Description of Artificial Sequence: Synthetic polynucleotide
  source 1..2580: mol_type = other DNA
ccatcgacgtcagacgcggaagcttcgatcaactacgcggacaggtaccaaaacaaatgttctcgtcacgtgggcatgaatctgatgctgtttccctgcagacaatgcgagagactgaatcagaattcaaatatctgcttcactcacggtgtcaaagactgtttagagtgctttcccgtgtcagaatctcaacccgtttctgtcgtcaaaaaggcgtatcagaaactgtgctacattcatcacatcatgggaaaggtgccagacgcttgcactgcttgcgacctggtcaatgtggacttggatgactgtgtttctgaacaataaatgacttaaaccaggtatggctgccgatggttatcttccagattggctcgaggacaaccttagtgaaggaattcgcgagtggtgggctttgaaacctggagcccctcaacccaaggcaaatcaacaacatcaagacaacgctcgaggtcttgtgcttccgggttacaaataccttggacccggcaacggactcgacaagggggagccggtcaacgcagcagacgcggcggccctcgagcacgacaaggcctacgaccagcagctcaaggccggagacaacccgtacctcaagtacaaccacgccgacgccgagttccaggagcggctcaaagaagatacgtcttttgggggcaacctcgggcgagcagtcttccaggccaaaaagaggcttcttgaacctcttggtctggttgaggaagcggctaagacggctcctggaaagaagaggcctgtagagcagtctcctcgggaaccggactcctccgcgggtattggcaaatcgggtgcacagcccgctaaaaagagactcaatttcggtcagactggcgacacagagtcagtcccagaccctcaaccaatcggagaacctcccgcagccccctcaggtgtgggatctcttacaatggcttcaggtggtggcgcaccagtggcagacaataacgaaggtgccgatggagtgggtagttcctcgggaaattggcattgcgattcccaatggctgggggacagagtcatcaccaccagcacccgaacctgggccctgcccacctacaacaatcacctctacaagcaaatctccaacagcacatctggaggatcttcaaatgacaacgcctacttcggctacagcaccccctgggggtattttgacttcaacagattccactgccacttctcaccacgtgactggcagcgactcatcaacaacaactggggattccggcctaagcgactcaacttcaagctcttcaacattcaggtcaaagaggttacggacaacaatggagtcaagaccatcgccaataaccttaccagcacggtccaggtcttcacggactcagactatcagctcccgtacgtgctcgggtcggctcacgagggctgcctcccgccgttcccagcggacgttttcatgattcctcagtacgggtatctgacgcttaatgatggaagccaggccgtgggtcgttcgtccttttactgcctggaatatttcccgtcgcaaatgctaagaacgggtaacaacttccagttcagctacgagtttgagaacgtacctttccatagcagctacgctcacagccaaagcctggaccgactaatgaatccactcatcgaccaatacttgtactatctctcaaagactattaacggttctggacagaatcaacaaacgctaaaattcagtgtggccggacccagcaacatggctgtccagggaagaaactacatacctggacccagctaccgacaacaacgtgtctcaaccactgtgactcaaaacaacaacagcgaatttgcttggcctggagcttcttcttgggctctcaatggacgtaatagcttgatgaatcctggacctgctatggccagccacaaagaaggagaggaccgtttctttcctttgtctggatctttaatttttggcaaacaaggaactggaagagacaacgtggatgcggacaaagtcatgataaccaacgaagaagaaattaaaactactaacccggtagcaacggagtcctatggacaagtggccacaaaccaccagagtgcccaagcacaggcgcagaccggctgggttcaaaaccaaggaatacttccgggtatggtttggcaggacagagatgtgtacctgcaaggacccatttgggccaaaattcctcacacggacggcaactttcacccttctccgctgatgggagggtttggaatgaagcacccgcctcctcagatcctcatcaaaaacacacctgtacctgcggatcctccaacggccttcaacaaggacaagctgaactctttcatcacccagtattctactggccaagtcagcgtggagatcgagtgggaactgcagaaggaaaacagcaagcgctggaacccggagatccagtacacttccaactattacaagtctaataatgttgaatttgctgttaatactgaaggtgtatatagtgaaccccgccccattggcaccagatacctgactcgtaatctgtaattgcttgttaatcaataaaccgtttaatt

SEQ ID NO: 605 - DNA, 2601 bp, synthetic construct
  misc_feature 1..2601: note = Description of Artificial Sequence: Synthetic polynucleotide
  source 1..2601: mol_type = other DNA
ccatcgacgtcagacgcggaagcttcgatcaactacgcggacaggtaccaaaacaaatgttctcgtcacgtgggcatgaatctgatgctgtttccctgcagacaatgcgagagactgaatcagaattcaaatatctgcttcactcacggtgtcaaagactgtttagagtgctttcccgtgtcagaatctcaacccgtttctgtcgtcaaaaaggcgtatcagaaactgtgctacattcatcacatcatgggaaaggtgccagacgcttgcactgcttgcgacctggtcaatgtggacttggatgactgtgtttctgaacaataaatgacttaaaccaggtatggctgccgatggttatcttccagattggctcgaggacaaccttagtgaaggaattcgcgagtggtgggctttgaaacctggagcccctcaacccaaggcaaatcaacaacatcaagacaacgctcgaggtcttgtgcttccgggttacaaataccttggacccggcaacggactcgacaagggggagccggtcaacgcagcagacgcggcggccctcgagcacgacaaggcctacgaccagcagctcaaggccggagacaacccgtacctcaagtacaaccacgccgacgccgagttccaggagcggctcaaagaagatacgtcttttgggggcaacctcgggcgagcagtctttcaggccaaaaagaggcttcttgaacctcttggtctggttgaggaagcggctaagacggctcctggaaagaagaggcctgtagagcagtctcctcaggaaccggactcctccgcgggtattggcaaatcgggtgcacagcccgctaaaaagagactcaatttcggtcagactggcgacacagagtcagtcccagaccctcaaccaatcggagaacctcccgcagccccctcaggtgtgggatctcttacaatggcttcatgtggtggcgcaccagtggcagacaataacgaaggtgccgatggagtgggtagttcctcgggaaattggcattgcgattcccaatggctgggggacagagtcatcaccaccagcacccgaacctgggccctgcccacctacaacaatcacctctacaagcaaatctccaacagcacatctggaggatcttcaaatgacaacgcctacttcggctacagcaccccctgggggtattttgacttcaacagattccactgccacttctcaccacgtgactggcagcgactcatcaacaacaactggggattccggcctaagcgactcaacttcaagctcttcaacattcaggtcaaagaggttacggacaacaatggagtcaagaccatcgccaataaccttaccagcacggtccaggtcttcacggactcagactatcagctcccgtacgtgctcgggtcggctcacgagggctgcctcccgccgttcccagcggacgttttcatgattcctcagtacgggtatctgacgcttaatgatggaagccaggccgtgggtcgttcgtccttttactgcctggaatatttcccgtcgcaaatgctaagaacgggtaacaacttccagttcagctacgagtttgagaacgtacctttccatagcagctacgctcacagccaaagcctggaccgactaatgaatccactcatcgaccaatacttgtactatctctcaaagactattaacggttctggacagaatcaacaaacgctaaaattcagtgtggccggacccagcaacatggctgtccagggaagaaactacatacctggacccagctaccgacaacaacgtgtctcaaccactgtgactcaaaacaacaacagcgaatttgcttggcctggagcttcttcttgggctctcaatggacgtaatagcttgatgaatcctggacctgctatggccagccacaaagaaggagaggaccgtttctttcctttgtctggatctttaatttttggcaaacaaggaactggaagagacaacgtggatgcggacaaagtcatgataaccaacgaagaagaaattaaaactactaacccggtagcaacggagtcctatggacaagtggccacaaaccaccagagtgcccaagcacaggcgcagaccggctgggttcaaaaccaaggaatacttccgggtatggtttggcaggacagagatgtgtacctgcaaggacccatttgggccaaaattcctcacacggacggcaactttcacccttctccgctgatgggagggtttggaatgaagcacccgcctcctcagatcctcatcaaaaacacacctgtacctgcggatcctccaacggccttcaacaaggacaagctgaactctttcatcacccagtattctactggccaagtcagcgtggagatcgagtgggagctgcagaaggaaaacagcaagcgctggaacccggagatccagtacacttccaactattacaagtctaataatgttgaatttgctgttaatactgaaggtgtatatagtgaaccccgccccattggcaccagatacctgactcgtaatctgtaattgcttgttaatcaataaaccgtttaattcgtttcagttgaactgcggcc

SEQ ID NO: 606 - DNA, 2601 bp, synthetic construct
  misc_feature 1..2601: note = Description of Artificial Sequence: Synthetic polynucleotide
  source 1..2601: mol_type = other DNA
ccatcgacgtcagacgcggaagcttcgatcaactacgcggacaggtaccaaaacaaatgttctcgtcacgtgggcatgaatctgatgctgtttccctgcagacaatgcgagagactgaatcagaattcaaatatctgcttcactcacggtgtcaaagactgtttagagtgctttcccgtgtcagaatctcaacccgtttctgtcgtcaaaaaggcgtatcagaaactgtgctacattcatcacatcatgggaaaggtgccagacgcttgcactgcttgcgacctggtcaatgtggacttggatgactgtgtttctgaacaataaatgacttaaaccaggtatggctgccgatggttatcttccagattggctcgaggacaaccttagtgaaggaattcgcgagtggtgggctttgaaacctggagcccctcaacccaaggcaaatcaacaacatcaagacaacgctcgaggtcttgtgcttccgggttacaaataccttggacccggcaacggactcgacaagggggagccgatcaacgcagcagacgcggcggccctcgagcacgacaaggcctacgaccagcagctcaaggccggagacaacccgtacctcaagtacaaccacgccgacgccgagttccaggagcggctcaaagaagatacgtcttttgggggcaacctcgggcgagcagtcttccaggccaaaaagaggcttcttgaacctcttggtctggttgaggaagcggctaagacggctcctggaaagaagaggcctgtagagcagtctcctcaggaaccggactcctccgcgggtattggcaaatcgggtgcacagcccgctaaaaagagactcaatttcggtcagactggcgacacagagtcagtcccagaccctcaaccaatcggagaacctcccgcagccccctcaggtgtgggatctcttacaatggcttcaggtggtggcgcaccagtggcagacaataacgaaggtgccgatggagtgggtagttcctcgggaaattggcattgcgattcccaatggctgggggacagagtcatcaccaccagcacccgaacctgggccctgcccacctacaacaatcacctctacaagcaaatctccaacagcacatctggaggatcttcaaatgacaacgcctacttcggctacagcaccccctgggggtattttgacttcaacagattccactgccacttctcaccacgtgactggcagcgactcatcaacaacaactggggattccggcctaagcgactcaacttcaagctcttcaacattcaggtcaaagaggttacggacaacaatggagtcaagaccatcgccaataaccttaccagcacggtccaggtcttcacggactcagactatcagctcccgtacgtgctcgggtcggctcacgagggctgcctcccgccgttcccagcggacgttttcatgattcctcagtacgggtatctgacgcttaatgatggaagccaggccgtgggtcgttcgtccttttactgcctggaatatttcccgtcgcaaatgctaagaacgggtaacaacttccagttcagctacgagtttgagaacgtacctttccatagcagctacgctcacagccaaagcctggaccgactaatgaatccactcatcgaccaatacttgtactatctctcaaagactattaacggttctggacagaatcaacaaacgctaaaattcagtgtggccggacccagcaacatggctgtccagggaagaaactacatacctggacccagctaccgacaacaacgtgtctcaaccactgtgactcaaaacaacaacagcgaatttgcttggcctggagcttcttcttgggctctcaatggacgtaatagcttgatgaatcctggacctgctatggccagccacaaagaaggagaggaccgtttctttcctttgtctggatctttaatttttggcaaacaaggaactggaagagacaacgtggatgcggacaaagtcatgataaccaacgaagaagaaattaaaactactaacccggtagcaacggagtcctatggacaagtggccacaaaccaccagagtgcccaagcacaggcgcagaccggctgggttcaaaaccaaggaatacttccgggtatggtttggcaggacagagatgtgtacctgcaaggacccatttgggccaaaattcctcacacgtacggcaactttcacccttctccgctgatgggagggtttggaatgaagcacccgcctcctcagatcctcatcaaaaacacacctgtacctgcggatcctccaacggccttcaacaaggacaagctgaactctttcatcacccagtattctactggccaagtcagcgtggagatcgagtgggagctgcagaaggaaaacagcaagcgctggaacccggagatccagtacacttccaactattacaagtctaataatgttgaatttgctgttaatactgaaggtgtatatagtgaaccccgccccattggcaccagatacctgactcgtaatctgtaattgcttgttaatcaataaaccgtttaattcgtttcagttgaactgcggcc

SEQ ID NO: 607 - DNA, 2601 bp, synthetic construct
  misc_feature 1..2601: note = Description of Artificial Sequence: Synthetic polynucleotide
  source 1..2601: mol_type = other DNA
ccatcgacgtcagacgcggaagcttcgatcaactacgcggacaggtaccaaaacaaatgttctcgccacgtgggcatgaatctgatgctgtttccctgcagacaatgcgagagactgaatcagaattcaaatatctgcttcactcacggtgtcaaagactgtttagagtgctttcccgtgtcagaatctcaacccgtttctgtcgtcaaaaaggcgtatcagaaactgtgctacattcatcacatcatgggaaaggtgccagacgcttgcactgcttgcgacctggtcaatgtggacttggatgactgtgtttctgaacaataaatgacttaaaccaggtatggctgccgatggttatcttccagattggctcgaggacaaccttagtgaaggaattcgcgagtggtgggctttgaaacctggagcccctcaacccaaggcaaatcaacaacatcaagacaacgctcgaggtcttgtgcttccgggttacaaataccttggacccggcaacggactcgacaagggggagccggtcaacgcagcagacgcggcggccctcgagcacgacaaggcctacgaccagcagctcaaggccggagacaacccgtacctcaagtacaaccacgccgacgccgagttccaggagcggctcaaagaagatacgtcttttgggggcaacctcgggcgagcagtcttccaggccaaaaagaggcttcttgaacctcttggtctggttgaggaagcggctaagacggctcctggaaagaagaggcctgtagagcagtctcctcaggaaccggactcctccgcgggtattggcaaatcgggtgcacagcccgctaaaaagagactcaatttcggtcagactggcgacacagagtcagtcccagaccctcaaccaatcggagaacctcccgctgccccctcaggtgtgggatctcttacaatggcttcaggtggtggcgcaccagtggcagacaataacgaaggtgccgatggagtgggtagttcctcgggaaattggcattgcgattcccaatggctgggggacagagtcatcaccaccagcacccgaacctgggccctgcccacctacaacaatcacctctacaagcaaatctccaacagcacatctggaggatcttcaaatgacaacgcctacttcggctacagcaccccctgggggtattttgacttcaacagattccactgccacttctcaccacatgactggcagcgactcatcaacaacaactggggattccggcctaagcgactcaacttcaagctcttcaacattcaggtcaaagaggttacggacaacaatggagtcaagaccatcgccaataaccttaccagcacggtccaggtcttcacggactcagactatcagctcccgtacgtgctcgggtcggctcacgagggctgcctcccgccgttcccagcggacgttttcatgattcctcagtacgggtatctgacgcttaatgatggaagccaggccgtgggtcgttcgtccttttactgcctggaatatttcccgtcgcaaatgctaagaacgggtaacaacttccagttcagctacgagtttgagaacgtacctttccatagcagctacgctcacagccaaagcctggaccgactaatgaatccactcatcgaccaatacttgtactatctctcaaagactattaacggttctggacagaatcaacaaacgctaaaattcaatgtggccggacccagcaacatggctgtccagggaagaaactacatacctggacccagctaccgacaacaacgtgtctcaaccactgtgactcaaaacaacaacagcgaatttgcctggcctagagcttcttcttgggctctcaatggacgtaatagcttgatgaatcctggacctgctatggccagccacaaagaaggagaggaccgtttctttcctttgtctggatctttaatttttggcaaacaaggaactggaagagacaacgtggatgcggacaaagtcatgataaccaacgaagaagaaattaaaactactaacccggtagcaacggagtcctatggacaagtggccacaaaccaccagagtgcccaagcacaggcgcagaccggctgggttcaaaaccaaggaatacttccgggtatggtttggcaggacagagatgtgtacctgcaaggacccatttgggccaaaattcctcacacggacggcaactttcacccttctccgctgatgggagggtttggaatgaagcacccgcctcctcagatcctcatcaaaaacacacctgtacctgcggatcctccaacggccttcaacaaggacaagctgaactctttcatcacccagtattctactggccaagtcagcatggagatcgagtgggagctgcagaaggaaaacagcaagcgctggaacccggagatccagtacacttccaactattacaagtctaataatgttgaatttgctgttaatactgaaggtgtatatagtgaaccccgccccattggcaccagatacctgactcgtaatctgtaattgcttgttaatcaataaaccgtttaattcgtttcagttgaactgcggcc

SEQ ID NO: 608 - DNA, 2601 bp, synthetic construct
  misc_feature 1..2601: note = Description of Artificial Sequence: Synthetic polynucleotide
  source 1..2601: mol_type = other DNA
ccatcgacgtcagacgcggaagcttcgatcaactacgcggacaggtaccaaaacaaatgttctcgtcacgtgggcatgaatctgatgctgtttccctgcagacaatgcgagagactgaatcagaattcaaatatctgcttcactcacggtgtcaaagactgtttagagtgctttcccgtgtcagaatctcaacccgtttctgtcgtcaaaaaggcgtatcagaaactgtgctacattcatcacatcatgggaaaggtgccagacgcttgcactgcttgcgacctggtcaatgtggacttggatgactgtgtttctgaacaataaatgacttaaaccaggtatggctgccgatggttatcttccagattggctcgaggacaaccttagtgaaggaattcgcgagtggtgggctttgaaacctggagcccctcaacccaaggcaaatcaacaacatcaagacaacgctcgaggtcttgtgcttccgggttacaaataccttggacccggcaacggactcgacaagggggagccggtcaacgcagcagacgcggcggccctcgagcacgacaaggcctacgaccagcagctcaaggccggagacaacccgtacctcaagtacaaccacgccgacgccgagttccaggagcggctcaaagaagatacgtcttttgggggcaacctcgggcgagcagtcttccaggccaaaaagaggcttcttgaacctcttggtctggttgaggaagcggctaagacggctcctggaaagaagaggcctgtagagcagtctcctcaggaaccggactcctccgcgggtattggcaaatcgggtgcacagcccgctaaaaagagactcaatttcggtcagactggcgacacagagtcagtcccagaccctcaaccaatcggagaacctcccgcagccccctcaggtgtgggatctcttacaatggcttcaggtggtggcgcaccagtggcagacaataacgaaggtgccgatggagtgggtagttcctcgggaaattggcattgcgattcccaatggctgggggacagagtcatcaccaccagcacccgaacctgggccctgcccacctacaacaatcacctctacaagcaaatctccaacagcacatctggaggatcttcaaatgacaacgcctacttcggctacagcaccccctgggggtattttgacttcaacagattccactgccacttctcaccacgtgactggcagcgactcatcaacaacaactggggattccggcctaagcgactcaacttcaagctcttcaacattcaggtcaaagaggttacggacaacaatggagtcaagaccatcgccaataaccttaccagcacggtccaggtcttcacggactcagactatcagctcccgtacgtgctcgggtcggctcacgagggctgcctcccgccgttcccagcggacgttttcatgattcctcagtacgggtatctgacgcttaatgatggaagccaggccgtgggtcgttcgtccttttactgcctggaatatttcccgtcgcaaatgctaagaacgggtaacaacttccagttcagctacgagtttgagaacgtacctttccatagcagctacgctcacagccaaagcctggaccgactaatgaatccactcatcgaccaatacttgtactatctctcaaagactattaacggttctggacagaatcaacaaacgctaaaattcagtgtggccggacccagcaacatggctgtccagggaagaaactacatacctggacccagctaccgacaacaacgtgtctcaaccactgtgactcaaaacaacaacagcgaatttgcttggcctagagcttcttcttgggctctcaatggacgtaatagcttgatgaatcctggacctgctatggccagccacaaagaaggagaggaccgtttctttcctttgtctggatctttaatttttggcaaacaaggaactggaagagacaacgtggatgcggacaaagtcatgataaccaacgaagaagaaattaaaactactaacccggtagcaacggagtcctatggacaagtggccacaaaccaccagagtgcccaagcacaggcgcagaccggctgggttcaaaaccaaggaatacttccgggtatggtttggcaggacagagatgtgtacctgcaaggacccatttgggccaaaattcctcacacggacggcaactttcacccttctccgctgatgggagggtttggaatgaagcacccgcctcctcagatcctcatcaaaaacacacctgtacctgcggatcctccaacggccttcaacaaggacaagctgaactctttcatcacccagtattctactggccaagtcagcgtggagatcgagtgggagctgcagaaggaaaacagcaagcgctggaacccggagatccagtacacttccaactattacaagtctaataatgttgaatttgctgttaatactgaaggtgtatatagtgaaccccgccccattggcaccagatacctgactcgtaatctgtaattgcttgttaatcaataaaccgtttaattcgtttcagttgaactgcggcc

SEQ ID NO: 609 - DNA, 2601 bp, synthetic construct
  misc_feature 1..2601: note = Description of Artificial Sequence: Synthetic polynucleotide
  source 1..2601: mol_type = other DNA
ccatcgacgtcagacgcggaagcttcgatcaactacgcggacaggtaccaaaacaaatgttctcgtcacgtgggcatgaatctgatgctgtttccctgcagacaatgcgagagactgaatcagaattcaaatatctgcttcactcacggtgtcaaagactgtttagagtgctttcccgtgtcagaatctcaacccgtttctgtcgtcaaaaaggcgtatcagaaactgtgctacattcatcacatcatgggaaaggtgccagacgcttgcactgcttgcgacctggtcaatgtggacttggatgactgtgtttctgaacaataaatgacttaaaccaggtatggctgccgatggttatcttccagattggctcgaggacaaccttagtgaaggaattcgcgagtggtgggctttgaaacctggagcccctcaacccaaggcaaatcaacaacatcaagacaacgctcgaggtcttgtgcttccgggttacaaataccttggacccggcaacggactcgacaagggggagccggtcaacgcagcagacgcggcggccctcgagcacgacaaggcctacgaccagcagctcaaggccggagacaacccgtacctcaagtacaaccacgccgacgccgagttccaggagcggctcaaagaagatacgtcttttgggggcaacctcgggcgagcagtcttccaggccaaaaagaggcttcttgaacctcttggtctggttgaggaagcggctaagacggctcctggaaagaagaggcctgtagagcagtctcctcaggaaccggactcctccgcgggtattggcaaatcgggtgcacagcccgctaaaaagagactcaatttcggtcagactggcgacacagagtcagtcccagaccctcaaccaatcggagaacctcccgcagccccctcaggtgtgggatctcttacaatggcttcaggtggtggcgcaccagtggcagacaataacgaaggtgccgatggagtgggtagttcctcgggaaattggcattgcgattcccaatggctgggggacagagtcatcaccaccagcacccgaacctgggccctgcccacctacaacaatcacctctacaagcaaatctccaacagcacatctggaggatcttcaaatgacaacgcctacttcggctacagcaccccctgggggtattttgacttcaacagattccactgccacttctcaccacgtgactggcagcgactcatcaacaacaactggggattccggcctaagcgactcaacttcaagctcttcaacattcaggtcaaagaggttacggacaacaatggagtcaagaccatcgccaataaccttaccagcacggtccaggtcttcacggactcagactatcagctcccgtacgtgctcgggtcggctcacgagggctgcctcccgccgttcccagcggacgttttcatgattcctcagtacgggtatctgacgcttaatgatggaagccaggccgtgggtcgttcgtccttttactgcctggaatatttcccgtcgcaaatgctaagaacgggtaacaacttccagttcagctacgagtttgagaacgtacctttccatagcagctacgctcacagccaaagcctggaccgactaatgaatccactcatcgaccaatacttgtactatctctcaaagactattaacggttctggacagaatcaacaaacgctaaaattcagtgtggccggacccagcaacatggctgtccagggaagaaactacatacctggacccagctaccgacaacaacgtgtctcaaccactgtgactcaaaacaacaacagcgaatttgcttggcctagagcttcttcttgggctctcaatggacgtaatagcttgatgaatcctggacctgctatggccagccacaaagaaggagaggaccgtttctttcctttgtctggatctttaatttttggcaaacaaggaactggaagagacaacgtggatgcggacaaagtcatgataaccaacgaagaagaaattaaaactactaacccggtagcaacggagtcctatggacaagtggccacaaaccaccagagtgcccaagcacaggcgcagaccggctgggttcaaaaccaaggaatacttccgggtatggtttggcaggacagagatgtgtacctgcaaggacccatttgggccaaaattcctcacacggacggcaactttcacccttctccgctgatgggagggtttggaatgaagcacccgcctcctcagatcctcatcaaaaacacacctgtacctgcggatcctccaacggccttcaacaaggacaagctgaactctttcatcacccagtattctactggccaagtcagcgtggagatcgagtgggagcggcagaaggaaaacagcaagcgctggaacccggagatccagtacacttccaactattacaagtctaataatgttgaatttgctgttaatactgaaggtgtatatagtgaaccccgccccattggcaccagatacctgactcgtaatctgtaattgcttgttaatcaataaaccgtttaattcgtttcagttgaactgcggcc

SEQ ID NO: 610 - DNA, 2601 bp, synthetic construct
  misc_feature 1..2601: note = Description of Artificial Sequence: Synthetic polynucleotide
  source 1..2601: mol_type = other DNA
ccatcgacgtcagacgcggaagcttcgatcaactacgcggacaggtaccaaaacaaatgttctcgtcacgtgggcatgaatctgatgctgtttccctgcagacaatgcgagagactgaatcagaattcaaatatctgcttcactcacggtgtcaaagactgtttagagtgctttcccgtgtcagaatctcaacccgtttctgtcgtcaaaaaggcgtatcagaaactgtgctacattcatcacatcatgggaaaggtgccagacgcttgcactgcttgcgacctggtcaatgtggacttggatgactgtgtttctgaacaataaatgacttaaaccaggtatggctgccgatggttatcttccagattggctcgaggacaaccttagtgaaggaattcgcgagtggtgggctttgaaacctggagcccctcaacccaaggcaaatcaacaacatcaagacaacgctcgaggtcttgtgcttccgggttacaaataccttggacccggcaacggactcgacaagggggagccggtcaacgcagcagacgcggcggccctcgagcacgacaaggcctacgaccagcagctcaaggccggagacaacccgtacctcaagtacaaccacgccgacgccgagttccaggagcggctcaaagaagatacgtcttttgggggcaacctcgggcgagcagtcttccaggccaaaaagaggcttcttgaacctcttggtctggttgaggaagcggctaagacggctcctggaaagaagaggcctgtagagcagtctcctcaggaaccggactcctccgcgggtattggcaaatcgggtgcacagcccgctaaaaagagactcaatttcggtcagactggcgacacagagtcagtcccagaccctcaaccaatcggagaacctcccgcagccccctcaggtgtgggatctcttacaatggcttcaggtggtggcgcaccagtggcagacaataacgaaggtgccgatggagtgggtagttcctcgggaaattggcattgcgattcccaatggctgggggacagagtcatcaccaccagcacccgaacctgggccctgcccacctacaacaatcacctctacaagcaaatctccaacagcacatctggaggatcttcaaatgacaacgcctacttcggctacagcaccccctgggggtattttgacttcaacagattccactgccacttctcaccacgtgactggcagcgactcatcaacaacaactggggattccggcctaagcgactcaacttcaagctcttcaacattcaggtcaaagaggttacggacaacaatggagtcaagaccatcgccaataaccttaccagcacggtccaggtcttcgcggactcagactatcagctcccgtacgtgctcgggtcggctcacgagggctgcctcccgccgttcccagcggacgttttcatgattcctcagtacgggtatctgacgcttaatgatggaagccaggccgtgggtcgttcgtccttttactgcctggaatatttcccgtcgcaaatgctaagaacgggtaacaacttccagttcagctacgagtttgagaacgtacctttccatagcagctacgctcacagccaaagcctggaccgactaatgaatccactcatcgaccaatacttgtactatctctcaaagactattaacggttctggacagaatcaacaaacgctaaaattcagtgtggccggacccagcaacatggctgtccagggaagaaactacatacctggacccagctaccgacaacaacgtgtctcaaccactgtgactcaaaacaacaacagcgaatttgcttggcctagagcttcttcttgggctctcaatggacgtaatagcttgatgaatcctggacctgctatggccagccacaaagaaggagaggaccgtttctttcctttgtctggatctttaatttttggcaaacaaggaactggaagagacaacgtggatgcggacaaagtcatgataaccaacgaagaagaaattaaaactactaacccggtagcaacggagtcctatggacaagtggccacaaaccaccagagtgcccaagcacaggcgcagaccggctgggttcaaaaccaaggaatacttccgggtatggtttggcaggacagagatgtgtacctgcaaggacccatttgggccaaaattcctcacacggacggcaactttcacccttctccgctgatgggagggtttggaatgaagcacccgcctcctcagatcctcatcaaaaacacacctgtacctgcggatcctccaacggccttcaacaaggacaagctgaactctttcatcacccagtattctactggccaagtcagcgtggagatcgagtgggagctgcagaaggaaaacagcaagcgctggaacccggagatccagtacacttccaactattacaagtctaataatgttgaatttgctgttaatactgaaggtgtatatagtgaaccccgccccattggcaccagatacctgactcgtaatctgtaattgcttgttaatcaataaaccgtttaattcgtttcagttgaactgcggcc

SEQ ID NO: 611 - DNA, 2601 bp, synthetic construct
  misc_feature 1..2601: note = Description of Artificial Sequence: Synthetic polynucleotide
  source 1..2601: mol_type = other DNA
ccatcgacgtcagacgcggaagcttcgatcaactacgcggacaggtaccaaaacaaatgttctcgtcacgtgggcatgaatctgatgctgtttccctgcagacaatgcgagagactgaatcagaattcaaatatctgcttcactcacggtgtcaaagactgtttagagtgctttcccgtgtcagaatctcaacccgtttctgtcgtcaaaaaggcgtatcagaaactgtgctacattcatcacatcatgggaaaggtgccagacgcttgcactgcttgcgacctggtcaatgtggacttggatgactgtgtttctgaacaataaatgacttaaaccaggtatggctgccgatggttatcttccagattggctcgaggacaaccttagtgaaggaattcgcgagtggtgggctttgaaacctggagcccctcaacccaaggcaaatcaacaacatcaagacaacgctcgaggtcttgtgcttccgggttacaaataccttggacccggcaacggactcgacaagggggagccggtcaacgcagcagacgcggcggccctcgagcacgacaaggcctacgaccagcagctcaaggccggagacaacccgtacctcaagtacaaccacgccgacgccgagttccaggagcggctcaaagaagatacgtcttttgggggcaacctcgggcgagcagtcttccaggccaaaaagaggcttcttgaacctcttggtctggttgaggaagcggctaagacggctcctggaaagaagaggcctgtagagcagtctcctcaggaaccggactcctccgcgggtattggcaaatcgggtgcacagcccgctaaaaagagactcaatttcggtcagactggcgacacagagtcagtcccagaccctcaaccaatcggagaacctcccgcagccccctcaggtgtgggatctcttacaatggcttcaggtggtggcgcaccagtggcagacaataacgaaggtgccgatggagtgggtagttcctcgggaaattggcattgcgattcccaatggctgggggacagagtcatcaccaccagcacccgaacctgggccctgcccacctacaacaatcacctctacaagcaaatctccaacagcacatctggaggatcttcaaatgacaacgcctacttcggctacagcaccccctgggggtattttgacttcaacagattccactgccacttctcaccacgtgactggcagcgactcatcaacaacaactggggattccggcctaagcgactcaacttcaagctcttcaacattcaggtcaaagaggttacggacaacaatggagtcaagaccatcgccaataaccttaccagcacggtccaggtcttcacggactcagactatcagctcccgtacgtgctcgggtcggctcacgagggctgcctcccgccgttcccagcggacgttttcatgattcctcagtacgggtatctgacgcttaatgatggaagccaggccgtgggtcgttcgtccttttactgcctggaatatttcccgtcgcaaatgctaagaacgggtaacaacttccagttcagctacgagtttgagaacgtacctttccatagcagctacgctcacagccaaagcctggaccgactaatgaatccactcatcgaccaatacttgtactatctctcaaagactattaacggttctggacagaatcaacaaacgctaaaattcagtgtggccggacccagcaacatggctgtccagggaagaaactacatacctggacccagctaccgacaacaacgtgtctcaaccactgtgactcaaaacaacaacagcgaaattgcttggcctagagcttcttcttgggctctcaatggacgtaatagcttgatgaatcctggacctgctatggccagccacaaagaaggagaggaccgtttctttcctttgtctggatctttaatttttggcaaacaaggaactggaagagacaacgtggatgcggacaaagtcatgataaccaacgaagaagaaattaaaactactaacccagtagcaacggagtcctatggacaagtggccacaaaccaccagagtgcccaagcacaggcgcagaccggctgggttcaaaaccaaggaatacttccgggtatggtttggcaggacagagatgtgtacctgcaaggacccatttgggccaaaattcctcacacggacggcaactttcacccttctccgctgatgggagggtttggaatgaagcacccgcctcctcagatcctcatcaaaaacacacctgtacctgcggatcctccaacggccttcaacaaggacaagctgaactctttcatcacccagtattctactggccaagtcagcgtggagatcgagtgggagctgcagaaggaaaacagcaagcgctggaacccggagatccagtacacttccaactattgcaagtctaataatgttgaatttgctgttaatactgaaggtgtatatagtgaaccccgccccattggcaccagatacctgactcgtaatctgtaattgcttgttaatcaataaaccgtttaattcgtttcagttgaactgcggcc

SEQ ID NO: 612 - DNA, 2601 bp, synthetic construct
  misc_feature 1..2601: note = Description of Artificial Sequence: Synthetic polynucleotide
  source 1..2601: mol_type = other DNA
ccatcgacgtcagacgcggaagcttcgatcaactacgcggacaggtaccaaaacaaatgttctcgtcacgtgggcatgaatctgatgctgtttccctgcagacaatgcgagagactgaatcagaattcaaatatctgcttcactcacggtgtcaaagactgtttagagtgctttcccgtgtcagaatctcaacccgtttctgtcgtcaaaaaggcgtatcagaaactgtgctacattcatcacatcatgggaaaggtgccagacgcttgcactgcttgcgacctggtcaatgtggacttggatgtctgtgtttctgaacaataaatgacttaaaccaggtatggctgccgatggttatcttccagattggctcgaggacaaccttagtgaaggaattcgcgagtggtgggctttgaaacctggagcccctcaacccaaggcaaatcaacaacatcaagacaacgctcgaggtcttgtgcttccgggttacaaataccttggacccggcaacggactcgataagggggagccggtcaacgcagcagacgcggcggccctcgagcacgacaaggcctacgaccagcagctcaaggccggagacaacccgtacctcaagtacaaccacgccgacgccgagttccaggagcggctcaaagaagatacgtcttttgggggcaacctcgggcgagcagtcttccaggccaaaaagaggcttcttgaacctcttggtctggttgaggaagcggctaagacggctcctggaaagaagaggcctgtagagcagtctcctcaggaaccggactcctccgcgggtattggcaaatcgggtgcacagcccgctaaaaagagactcaatttcggtcagactggcgacacagagtcagtcccagaccctcaaccaatcggagaacctcccgcagccccctcaggtgtgggatctcttacaatggcttcaggtggtggcgcaccagtggcagacaataacgaaggtgccgatggagtgggtagttcctcgggaaattggcattgcgattcccaatggctgggggacagagtcatcaccaccagcacccgaacctgggccctgcccacctacaacaatcacctctacaagcaaatctccaacagcacatctggaggatcttcaaatgacaacgcctacttcggctacagcaccccctgggggtattttgacttcaacagattccactgccacttctcaccacgtgactggcagcgactcatcaacaacaactggggattccggcctaagcgactcaacttcaagctcttcaacattcaggtcaaagaggttacggacaacaatggagtcaagaccatcgccaataaccttaccagcacggtccaggtcttcacggactcagactatcagctcccgtacgtgctcgggtcggctcacgagggctgcctcccgccgttcccagcggacgttttcatgattcctcagtacgggtatctgacgcttaatgatggaagccaggccgtgggtcgttcgtccttttactgcctggaatatttcccgtcgcaaatgctaagaacgggtaacaacttccagttcagctacgagtttgagaacgtacctttccatagcagctacgctcacagccaaagcctggaccgactaatgaatccactcatcgaccaatacttgtactatctctcaaagactattaacggttctggacagaatcaacaaacgctaaaattcagtgtggccggacccagcaacatggctgtccagggaagaaactacatacctggacccagctaccgacaacaacgtgtctcaaccactgtgactcaaaacaacaacagcgaatttgcttggcctagagcttcttcttgggctctcaatggacgtaatagcttgatgaatcctggacctgctatggccagccacaaagaaggagaggaccgtttctttcctttgtctggatctttaatttttggcaaacaaggaactggaagagacaacgtggatgcggacaaagtcatgataaccaacgaagaagaaattaaaactactaacccggtagcaacggagtcctatggacaagtggccacaaaccaccagagtgcccaagcacaggcgcagaccggctgggttcaaaaccaaggaatacttccgggtatggtttggcaggacagagatgtgtacctgcaaggacccatttgggccaaaattcctcacacggacggcaactttcacccttctccgctgatgggagggtttggaatgaagcacccgcctcctcagatcctcatcaaaaacacacctgtacctgcggatcctccaacggccttcaacaaggacaagctgaactctttcatcacccagtattctactggccaagtcagcgtggagatcgagtgggagctgcagaaggaaaacagcaagcgctggaacccggagatccagtacacttccaactattacaagtctaataatgttgaatttgctgttaatactgaaggtgtatatagtgaaccccgccccattggcaccagatacctgactcgtaatctgtaattgcttgttaatcaataaaccgtttaattcgtttcagttgaactgcggcc

SEQ ID NO: 613 - protein, 736 aa, synthetic construct
  REGION 1..736: note = Description of Artificial Sequence: Synthetic polypeptide
MTADGYLPDWLEDNLSEGIREWWALKPGAPQPKANQQHQDNARGLVLPGYKYLGPGNGLDKGEPVNAADAAALEHDKAYDQQLKAGDNPYLKYNHADAEFQERLKEDTSFGGNLGRAVFQAKKRLLEPLGLVEEAAKTAPGKKRPVEQSPQEPDSSAGIGKSGAQPAKKRLNFGQTGDTESVPDPQPIGEPPAAPSGVGSLTMASGGGAPVADNNEGADGVGSSSGNWHCDSQWLGDRVITTSTRTWALPTYNNHLYKQISNSTSGGSSNDNAYFGYSTPWGYFDFNRFHCHFSPRDWQRLINNNWGFRPKQLNFKLFNIQVKEVTDNNGVKTIANNLTSTVQVFTDSDYQLPYVLGSAHEGCLPPFPADVFMIPQYGYLTLNDGSQAVGRSSFYCLEYFPSQMLRTGNNFQFSYEFENVPFHSSYAHSQSLDRLMNPLIDQYLYYLSKTINGSGQNQQTLKFSVAGPSNMAVQGRNYIPGPSYRQQRVSTTVTQNNNSEFAWPGASSWALNGRNSLMNPGPAMASHKEGEDRFFPLSGSLIFGKQGTGRDNVDADKVMITNEEEIKTTNPVATESYGQVATNHQSAQAQAQTGWVQNQGILPGMVWQDRDVYLQGPIWAKIPHTDGNFHPSPLMGGFGMKHPPPQILIKNTPVPADPPTAFNKDKLNSFITQYSTGQVSVEIEWELQKENSKRWNPEIQYTSNYYKSNNVEFAVNTEGVYSEPRPIGTRYLTRNL

SEQ ID NO: 614 - protein, 736 aa, synthetic construct
  REGION 1..736: note = Description of Artificial Sequence: Synthetic polypeptide
MAADGYLPDWLEDNLSEGIREWWALKPGAPQPKANQQHQDNARGLVLPGYKYLGPGNGLDKGEPVNAADAAALEHDKAYDQQLKAGDNPYLKYNHADAEFQERLKEDTSFGGNLGRAVFQAKKRLLEPLGLVEEAAKTAPGKKRPVEQSPQEPDSSAGIGKSGAQPAKKRLNFGQTGDTESVPDPQPIGEPPAAPSGVGSLTMASGGGAPVADNNEGADGVGSSSGNWHCDSQWLGDRVITTSTRTWALPTYNNHLYKQISNSTSGGSSNDNAYFGYSTPWGYFDFNRFHCHFSPRDWQRLINNNWGFRPKRLNFKLFNIQVKEVTDNNGVKTIANNLTSTVQVFTDSDYQLPYVLGSAHEGCLPPFPADVFMIPQYGYLTLNDGSQAVGRSSFYCLEYFPSQMLRTGNNFQFSYEFENVPFHSSYAHSQSLDRLMNPLIDQYLYYLSKTINGSGQNQQTLKFSVAGPSNMAVQGRNYIPGPSYRQQRVSTTVTQNNNSEFAWPGASSWALNGRNSLMNPGPAMASHKEGEDRFFPLSGSLIFGKQGTGRDNVDADKVMITNEEEIKTTNPVATESYGQVATNHQSAQAQAQTGWVQNQGILPGMVWQDRDVYLQGPIWAKIPHTGGNFHPSPLMGGFGMKHPPPQILIKNTPVPADPPTAFNKDKLNSFITQYSTGQVSVEIEWELQKENSKRWNPEIQYTSNYYKSNNVEFAVNTGGVYSEPRPIGTRYLTRNL

SEQ ID NO: 615 - protein, 736 aa, synthetic construct
  REGION 1..736: note = Description of Artificial Sequence: Synthetic polypeptide
MAADGYLPDWLEDNLSEGIREWWALKPGAPQPKANQQHQDNARGLVLPGYKYLGPGNGLDKGEPVNAADAAALEHDKAYDQQLKAGDNPYLKYNHADAEFQERLKEDTSFGGNLGRAVFQAKKRLLEPLGLVEEAAKTAPGKKRPVEQSPQEPDSSAGIDKSGAQPAKKRLNFGQTGDTESVPDPQPIGEPPAAPSGVGSLTMASGGGAPVADNNEGADGVGSSSGNWHCDSQWLGDRVITTSTRTWALPTYNNHLYKQISNSTSGGSSNDNAYFGYSTPWGYFDFNRFHCHFSPRDWQRLINNNWGFRPKRLNFKLFNIQVKEVTDNNGVKTIANNLTSTVQVFTDSDYQLPYVLGSAHEGCLPPFPADVFMIPQYGYLTLNDGSQAVGRSSFYCLEYFPSQMLRTGNNFQFSYEFENVPFHSSYAHSQSLDRLMNPLIDQYLYYLSKTINGSGQNQQTLKFSVAGPSNMAVQGRNYIPGPSYRQQRVSTTVTQNNNSEFAWPGASSWALNGRNSLMNPGPAMASHKEGEDRFFPLSGSLIFGKQGTGRDNVDADKVMITNEEEIKTTNPVATESYGQVATNHQSAQAQAQTGWVQNQGILPGMVWQDRDVYLQGPIWAKIPHTDGNFHPSPLMGGFGMKHPPPQILIKNTPVPADPPTAFNKDKLNSFITQYSTGQVSVEIEWELQKENSKRWNPEIQYTSNYYKSNNVEFAVNTEGVYSEPRPIGTRYLTRNL

SEQ ID NO: 616 - protein, 736 aa, synthetic construct
  REGION 1..736: note = Description of Artificial Sequence: Synthetic polypeptide
MAADGYLPDWLEDNLSEGIREWWALKPGAPQPKANQQHQDNARGLVLPGYKYLGPGNGLDKGEPVNAADAAALEHDKAYDQQLKAGDNPYLKYNHADAEFQERLKEDTSFGGNLGRAVLQAKKRLLEPLGLVEEAAKTAPGKKRPVEQSPQEPDSSAGIGKSGAQPAKKRLNFGQTGDTESVPDPQPIGEPPAAPSGVGSLTMASGGGAPVADNNEGADGVGSSSGNWHCDSQWLGDRVITTSTRTWALPTYNNHLYKQISNSTSGGSSNDNAYFGYSTPWGYFDFNRFHCHFSPRDWQRLINNNWGFRPKRLNFKLFNIQVKEVTDNNGVKTIANNLTSTVQVFTDSDYQLPYVLGSAHEGCLPPFPADVFMIPQYGYLTLNDGSQAVGRSSFYCLEYFPSQMLRTGNNFQFSYEFENVPFHSSYAHSQSLDRLMNPLIDQYLYYLSKTINGSGQNQQTLKFSVAGSSNMAVQGRNYIPGPSYRQQRVSTTVTQNNNSEFAWPGASSWALNGRNSLMNPGPAMASHKEGEDRFFPLSGSLIFGKQGTGRDNVDADKVMITNEEEIKTTNPVATESYGQVATNHQSAQAQAQTGWVQNQGILPGMVWQDRDVYLQGPIWAKIPHTDGNFHPSPLMGGFGMKHPPPQILIKNTPVPADPPTAFNKDKLNSFITQYSTGQVSVEIEWELQKENSKRWNPEIQYTSNYYKSNNVEFAVNTEGVYSEPRPIGTRYLTRNL

SEQ ID NO: 617 - protein, 736 aa, synthetic construct
  REGION 1..736: note = Description of Artificial Sequence: Synthetic polypeptide
MAADGYLPDWLEDNLSEGIREWWALKPGAPQPKANQQHQDNARGLVLPGYKYLGPGNGLDKGEPVNAADAAALEHDRAYDQQLKAGDNPYLKYNHADAEFQERLKEDTSFGGNLGRAVFQAKKRLLEPLGLVEEAAKTAPGKKRPVEQSPQEPDSSAGIGKSGAQPAKKRLNFGQTGDTESVPDPQPIGEPPAAPSGVGSLTMASGGGAPVADNNEGADGVGSSSGNWHCDSQWLGDRVITTSTRTWALPTYNNHLYKQISNSTSGGSSNDNAYFGYSTPWGYFDFNRFHCHFSPRDWQRLINNNWGFRPKRLNFKLFNIQVKEVTDNNGVKTIANNLTSTVQVFTDSDYQLPYVLGSAHEGCLPPFPADVFMIPQYGYLTLNDGSQAVGRSSFYCLEYFPSQMLRTGNNFQFSYEFENVPFHSSYAHSQSLDRLMNPLIDQYLYYLSKTINGSGQNQQTLKFSVAGPSNMAVQGRNYIPGPSYRQQRVSTTVTQNNNSEFAWPGASSWALNGRNSLMNPGPAMASHKEGEDRFFPLSGSLIFGKQGTGRDNVDADKVMITNEEEIKTTNPVATESYGQVATNHQSAQAQAQTGWVQNQGILPGMVWQDRDVYLQGPIWAKIPHTDGNFHPSPLMGGFGMKHPPPQILIKNTPVPADPPTAFNKDKLNSFITQYSTGQVSVEIEWELQKKNSKRWNPEIQYTSNYYKSNNVEFAVNTEGVYSEPRPIGTRYLTRNL

SEQ ID NO: 618 - protein, 736 aa, synthetic construct
  REGION 1..736: note = Description of Artificial Sequence: Synthetic polypeptide
MAADGYLPDWLEDNLSEGIREWWALKPGAPQPKANQQHQDNARGLVLPGYKYLGPGNGLDKGEPVNAADAAALEHDKAYDQQLKAGDNPYLKYNHADAEFQERLKEDTSFGGNLGRAVFQAKKRLLEPLGLVEEAAKTAPGKKRPVEQSPQEPDSSAGIGKSGAQPAKKRLNFGQTGDTESVPDPQPIGEPPAAPSGVGSLTMASGGGAPVADNNEGADGVGSSSGNWHCDSQWLGDRVITTSTRTWALPTYNNHLYKQISNSTSGGSSNDNAYFGYSTPWGYFDFNRFHCHFSPRDWQRLINNNWGFRPKRLNFKLFNIQVKEVTDNNGVKTIANNLTSTVQVFTDSDYQLPYVLGSAHEGCLPPFPADVFMIPQYGYLTLNDGSQAVGRSSFYCLEYFPSQMLRTGNNFQFSYEFENVPFHSSYAHSQSLDRLMNPLIDQYLYYLSKTINGSGQNQQTLKFSVAGPSNMAVQGRNYIPGPSYRQQRVSTTVTQNNNSEFAWPGASSWALNGRNSLMNPGPAMASHKEGEDRFFPLSGSLIFGKQGTGRDNVDADKVMITNEEEIKTTNPVATESYGQVATNHQSAQARAQTGWVQNQGILPGMVWQDRDVYLQGPIWAKIPHTDGNFHPSPLMGGFGMKHPPPQILIKNTPVPADPPTAFNKDKLNSFITQYSTGQVSVEIEWELQKENSKRWNPEIQYTSNYYKSNNVEFAVNTEGVYSEPRPIGTRYLTRNL

SEQ ID NO: 619 - protein, 736 aa, synthetic construct
  REGION 1..736: note = Description of Artificial Sequence: Synthetic polypeptide
MAADGYLPDWLEDNLSEGIREWWALKPGAPQPKANQQHQDNARGLVLPGYKYLGPGNGLDKGEPVNAVDAAALEHDKAYDQQLKAGDNPYLKYNHADAEFQERLKEDTSFGGNLGRAVFQAKKRLLEPLGLVEEAAKTAPGKKRPVEQSPQEPDSSAGIGKSGAQPAKKRLNFGQTGDTESVPDPQPIGEPPAAPSGVGSLTMASGGGAPVADNNEGADGVGSSSGNWHCDSQWLGDRVITTSTRTWALPTYNNHLYKQISNSTSGGSSNDNAYFGYSTPWGYFDFNRFHCHFSPRDWQRLINNNWGFRPKRLNFKLFNIQVKEVTDNNGVKTIANNLTSTVQVFTDSDYQLPYVLGSAHEGCLPPFPADVFMIPQYGYLTLNDGSQAVGRSSFYCLEYFPSQMLRTGNNFQFSYEFENVPFHSSYAHSQSLDRLMNPLIDQYLYYLSKTINGSGQNQQTLKFSVAGPSNMAVQGRNYIPGPSYRQQRVSTTVTQNNNSEFAWPGASSWALNGRNSLMNPGPAMASHKEGEDRFFPLSGSLIFGKQGTGRDNVDADKVMITNEEEIKTTNPVATESYGQVATNHQSAQAQAQTGWVQNQGILPGMVWQDRDVYLQGPIWAKIPHTDGNFHPSPLMGGFGMKHPPPQILIKNTPVPADPPTAFNKDKLNSFITQYSTGQVSVEIEWELQKENSKRWNPEIQYTSNYYKSNNVEFAVNTEGVYSEPRPIGTRYLTRNL

SEQ ID NO: 620 - protein, 736 aa, synthetic construct
  REGION 1..736: note = Description of Artificial Sequence: Synthetic polypeptide
MAADGYLPDWLEDNLSEGIREWWALKPGAPQPKANQQHQDNARGLVLPGYKYLGPGNGLDKGEPVNAADAAALEHDKAYDQQLKAGDNPYLKYNHADAEFQERLKEDTSFGGNLGRAVFQAKKRLLEPLGLVEEAAKTAPGKKRPVEQSPREPDSSAGIGKSGAQPAKKRLNFGQTGDTESVPDPQPIGEPPAAPSGVGSLTMASGGGAPVADNNEGADGVGSSSGNWHCDSQWLGDRVITTSTRTWALPTYNNHLYKQISNSTSGGSSNDNAYFGYSTPWGYFDFNRFHCHFSPRDWQRLINNNWGFRPKRLNFKLFNIQVKEVTDNNGVKTIANNLTSTVQVFTDSDYQLPYVLGSAHEGCLPPFPADVFMIPQYGYLTLNDGSQAVGRSSFYCLEYFPSQMLRTGNNFQFSYEFENVPFHSSYAHSQSLDRLMNPLIDQYLYYLSKTINGSGQNQQTLKFSVAGPSNMAVQGRNYIPGPSYRQQRVSTTVTQNNNSEFAWPGASSWALNGRNSLMNPGPAMASHKEGEDRFFPLSGSLIFGKQGTGRDNVDADKVMITNEEEIKTTNPVATESYGQVATNHQSAQAQAQTGWVQNQGILPGMVWQDRDVYLQGPIWAKIPHTDGNFHPSPLMGGFGMKHPPPQILIKNTPVPADPPTAFNKDKLNSFITQYSTGQVSVEIEWELQKENSKRWNPEIQYTSNYYKSNNVEFAVNTEGVYSEPRPIGTRYLTRNL

SEQ ID NO: 621 - protein, 736 aa, synthetic construct
  REGION 1..736: note = Description of Artificial Sequence: Synthetic polypeptide
MAADGYLPDWLEDNLSEGIREWWALKPGAPQPKANQQHQDNARGLVLPGYKYLGPGNGLDKGEPVNAADAAALEHDKAYDQQLKAGDNPYLKYNHADAEFQERLKEDTSFGGNLGRAVFQAKKRLLEPLGLVEEAAKTAPGKKRPVEQSPQEPDSSAGIGKSGAQPAKKRLNFGQTGDTESVPDPQPIGEPPAAPSGVGSLTMASCGGAPVADNNEGADGVGSSSGNWHCDSQWLGDRVITTSTRTWALPTYNNHLYKQISNSTSGGSSNDNAYFGYSTPWGYFDFNRFHCHFSPRDWQRLINNNWGFRPKRLNFKLFNIQVKEVTDNNGVKTIANNLTSTVQVFTDSDYQLPYVLGSAHEGCLPPFPADVFMIPQYGYLTLNDGSQAVGRSSFYCLEYFPSQMLRTGNNFQFSYEFENVPFHSSYAHSQSLDRLMNPLIDQYLYYLSKTINGSGQNQQTLKFSVAGPSNMAVQGRNYIPGPSYRQQRVSTTVTQNNNSEFAWPGASSWALNGRNSLMNPGPAMASHKEGEDRFFPLSGSLIFGKQGTGRDNVDADKVMITNEEEIKTTNPVATESYGQVATNHQSAQAQAQTGWVQNQGILPGMVWQDRDVYLQGPIWAKIPHTDGNFHPSPLMGGFGMKHPPPQILIKNTPVPADPPTAFNKDKLNSFITQYSTGQVSVEIEWELQKENSKRWNPEIQYTSNYYKSNNVEFAVNTEGVYSEPRPIGTRYLTRNL

SEQ ID NO: 622 - protein, 736 aa, synthetic construct
  REGION 1..736: note = Description of Artificial Sequence: Synthetic polypeptide
MAADGYLPDWLEDNLSEGIREWWALKPGAPQPKANQQHQDNARGLVLPGYKYLGPGNGLDKGEPINAADAAALEHDKAYDQQLKAGDNPYLKYNHADAEFQERLKEDTSFGGNLGRAVFQAKKRLLEPLGLVEEAAKTAPGKKRPVEQSPQEPDSSAGIGKSGAQPAKKRLNFGQTGDTESVPDPQPIGEPPAAPSGVGSLTMASGGGAPVADNNEGADGVGSSSGNWHCDSQWLGDRVITTSTRTWALPTYNNHLYKQISNSTSGGSSNDNAYFGYSTPWGYFDFNRFHCHFSPRDWQRLINNNWGFRPKRLNFKLFNIQVKEVTDNNGVKTIANNLTSTVQVFTDSDYQLPYVLGSAHEGCLPPFPADVFMIPQYGYLTLNDGSQAVGRSSFYCLEYFPSQMLRTGNNFQFSYEFENVPFHSSYAHSQSLDRLMNPLIDQYLYYLSKTINGSGQNQQTLKFSVAGPSNMAVQGRNYIPGPSYRQQRVSTTVTQNNNSEFAWPGASSWALNGRNSLMNPGPAMASHKEGEDRFFPLSGSLIFGKQGTGRDNVDADKVMITNEEEIKTTNPVATESYGQVATNHQSAQAQAQTGWVQNQGILPGMVWQDRDVYLQGPIWAKIPHTYGNFHPSPLMGGFGMKHPPPQILIKNTPVPADPPTAFNKDKLNSFITQYSTGQVSVEIEWELQKENSKRWNPEIQYTSNYYKSNNVEFAVNTEGVYSEPRPIGTRYLTRNL

SEQ ID NO: 623 - protein, 736 aa, synthetic construct
  REGION 1..736: note = Description of Artificial Sequence: Synthetic polypeptide
MAADGYLPDWLEDNLSEGIREWWALKPGAPQPKANQQHQDNARGLVLPGYKYLGPGNGLDKGEPVNAADAAALEHDKAYDQQLKAGDNPYLKYNHADAEFQERLKEDTSFGGNLGRAVFQAKKRLLEPLGLVEEAAKTAPGKKRPVEQSPQEPDSSAGIGKSGAQPAKKRLNFGQTGDTESVPDPQPIGEPPAAPSGVGSLTMASGGGAPVADNNEGADGVGSSSGNWHCDSQWLGDRVITTSTRTWALPTYNNHLYKQISNSTSGGSSNDNAYFGYSTPWGYFDFNRFHCHFSPHDWQRLINNNWGFRPKRLNFKLFNIQVKEVTDNNGVKTIANNLTSTVQVFTDSDYQLPYVLGSAHEGCLPPFPADVFMIPQYGYLTLNDGSQAVGRSSFYCLEYFPSQMLRTGNNFQFSYEFENVPFHSSYAHSQSLDRLMNPLIDQYLYYLSKTINGSGQNQQTLKFNVAGPSNMAVQGRNYIPGPSYRQQRVSTTVTQNNNSEFAWPRASSWALNGRNSLMNPGPAMASHKEGEDRFFPLSGSLIFGKQGTGRDNVDADKVMITNEEEIKTTNPVATESYGQVATNHQSAQAQAQTGWVQNQGILPGMVWQDRDVYLQGPIWAKIPHTDGNFHPSPLMGGFGMKHPPPQILIKNTPVPADPPTAFNKDKLNSFITQYSTGQVSMEIEWELQKENSKRWNPEIQYTSNYYKSNNVEFAVNTEGVYSEPRPIGTRYLTRNL

SEQ ID NO: 624 - protein, 736 aa, synthetic construct
  REGION 1..736: note = Description of Artificial Sequence: Synthetic polypeptide
MAADGYLPDWLEDNLSEGIREWWALKPGAPQPKANQQHQDNARGLVLPGYKYLGPGNGLDKGEPVNAADAAALEHDKAYDQQLKAGDNPYLKYNHADAEFQERLKEDTSFGGNLGRAVFQAKKRLLEPLGLVEEAAKTAPGKKRPVEQSPQEPDSSAGIGKSGAQPAKKRLNFGQTGDTESVPDPQPIGEPPAAPSGVGSLTMASGGGAPVADNNEGADGVGSSSGNWHCDSQWLGDRVITTSTRTWALPTYNNHLYKQISNSTSGGSSNDNAYFGYSTPWGYFDFNRFHCHFSPRDWQRLINNNWGFRPKRLNFKLFNIQVKEVTDNNGVKTIANNLTSTVQVFTDSDYQLPYVLGSAHEGCLPPFPADVFMIPQYGYLTLNDGSQAVGRSSFYCLEYFPSQMLRTGNNFQFSYEFENVPFHSSYAHSQSLDRLMNPLIDQYLYYLSKTINGSGQNQQTLKFSVAGPSNMAVQGRNYIPGPSYRQQRVSTTVTQNNNSEFAWPRASSWALNGRNSLMNPGPAMASHKEGEDRFFPLSGSLIFGKQGTGRDNVDADKVMITNEEEIKTTNPVATESYGQVATNHQSAQAQAQTGWVQNQGILPGMVWQDRDVYLQGPIWAKIPHTDGNFHPSPLMGGFGMKHPPPQILIKNTPVPADPPTAFNKDKLNSFITQYSTGQVSVEIEWELQKENSKRWNPEIQYTSNYYKSNNVEFAVNTEGVYSEPRPIGTRYLTRNL

SEQ ID NO: 625 - protein, 736 aa, synthetic construct
  REGION 1..736: note = Description of Artificial Sequence: Synthetic polypeptide
MAADGYLPDWLEDNLSEGIREWWALKPGAPQPKANQQHQDNARGLVLPGYKYLGPGNGLDKGEPVNAADAAALEHDKAYDQQLKAGDNPYLKYNHADAEFQERLKEDTSFGGNLGRAVFQAKKRLLEPLGLVEEAAKTAPGKKRPVEQSPQEPDSSAGIGKSGAQPAKKRLNFGQTGDTESVPDPQPIGEPPAAPSGVGSLTMASGGGAPVADNNEGADGVGSSSGNWHCDSQWLGDRVITTSTRTWALPTYNNHLYKQISNSTSGGSSNDNAYFGYSTPWGYFDFNRFHCHFSPRDWQRLINNNWGFRPKRLNFKLFNIQVKEVTDNNGVKTIANNLTSTVQVFTDSDYQLPYVLGSAHEGCLPPFPADVFMIPQYGYLTLNDGSQAVGRSSFYCLEYFPSQMLRTGNNFQFSYEFENVPFHSSYAHSQSLDRLMNPLIDQYLYYLSKTINGSGQNQQTLKFSVAGPSNMAVQGRNYIPGPSYRQQRVSTTVTQNNNSEFAWPRASSWALNGRNSLMNPGPAMASHKEGEDRFFPLSGSLIFGKQGTGRDNVDADKVMITNEEEIKTTNPVATESYGQVATNHQSAQAQAQTGWVQNQGILPGMVWQDRDVYLQGPIWAKIPHTDGNFHPSPLMGGFGMKHPPPQILIKNTPVPADPPTAFNKDKLNSFITQYSTGQVSVEIEWERQKENSKRWNPEIQYTSNYYKSNNVEFAVNTEGVYSEPRPIGTRYLTRNL

SEQ ID NO: 626 - protein, 736 aa, synthetic construct
  REGION 1..736: note = Description of Artificial Sequence: Synthetic polypeptide
MAADGYLPDWLEDNLSEGIREWWALKPGAPQPKANQQHQDNARGLVLPGYKYLGPGNGLDKGEPVNAADAAALEHDKAYDQQLKAGDNPYLKYNHADAEFQERLKEDTSFGGNLGRAVFQAKKRLLEPLGLVEEAAKTAPGKKRPVEQSPQEPDSSAGIGKSGAQPAKKRLNFGQTGDTESVPDPQPIGEPPAAPSGVGSLTMASGGGAPVADNNEGADGVGSSSGNWHCDSQWLGDRVITTSTRTWALPTYNNHLYKQISNSTSGGSSNDNAYFGYSTPWGYFDFNRFHCHFSPRDWQRLINNNWGFRPKRLNFKLFNIQVKEVTDNNGVKTIANNLTSTVQVFADSDYQLPYVLGSAHEGCLPPFPADVFMIPQYGYLTLNDGSQAVGRSSFYCLEYFPSQMLRTGNNFQFSYEFENVPFHSSYAHSQSLDRLMNPLIDQYLYYLSKTINGSGQNQQTLKFSVAGPSNMAVQGRNYIPGPSYRQQRVSTTVTQNNNSEFAWPRASSWALNGRNSLMNPGPAMASHKEGEDRFFPLSGSLIFGKQGTGRDNVDADKVMITNEEEIKTTNPVATESYGQVATNHQSAQAQAQTGWVQNQGILPGMVWQDRDVYLQGPIWAKIPHTDGNFHPSPLMGGFGMKHPPPQILIKNTPVPADPPTAFNKDKLNSFITQYSTGQVSVEIEWELQKENSKRWNPEIQYTSNYYKSNNVEFAVNTEGVYSEPRPIGTRYLTRNL

SEQ ID NO: 627 - protein, 736 aa, synthetic construct
  REGION 1..736: note = Description of Artificial Sequence: Synthetic polypeptide
MAADGYLPDWLEDNLSEGIREWWALKPGAPQPKANQQHQDNARGLVLPGYKYLGPGNGLDKGEPVNAADAAALEHDKAYDQQLKAGDNPYLKYNHADAEFQERLKEDTSFGGNLGRAVFQAKKRLLEPLGLVEEAAKTAPGKKRPVEQSPQEPDSSAGIGKSGAQPAKKRLNFGQTGDTESVPDPQPIGEPPAAPSGVGSLTMASGGGAPVADNNEGADGVGSSSGNWHCDSQWLGDRVITTSTRTWALPTYNNHLYKQISNSTSGGSSNDNAYFGYSTPWGYFDFNRFHCHFSPRDWQRLINNNWGFRPKRLNFKLFNIQVKEVTDNNGVKTIANNLTSTVQVFTDSDYQLPYVLGSAHEGCLPPFPADVFMIPQYGYLTLNDGSQAVGRSSFYCLEYFPSQMLRTGNNFQFSYEFENVPFHSSYAHSQSLDRLMNPLIDQYLYYLSKTINGSGQNQQTLKFSVAGPSNMAVQGRNYIPGPSYRQQRVSTTVTQNNNSEIAWPRASSWALNGRNSLMNPGPAMASHKEGEDRFFPLSGSLIFGKQGTGRDNVDADKVMITNEEEIKTTNPVATESYGQVATNHQSAQAQAQTGWVQNQGILPGMVWQDRDVYLQGPIWAKIPHTDGNFHPSPLMGGFGMKHPPPQILIKNTPVPADPPTAFNKDKLNSFITQYSTGQVSVEIEWELQKENSKRWNPEIQYTSNYCKSNNVEFAVNTEGVYSEPRPIGTRYLTRNL

SEQ ID NO: 628 - protein, 736 aa, synthetic construct; identical to SEQ ID NO: 624
  REGION 1..736: note = Description of Artificial Sequence: Synthetic polypeptide

SEQ ID NO: 629 - DNA, 2208 bp, synthetic construct
  misc_feature 1..2208: note = Description of Artificial Sequence: Synthetic polynucleotide
  source 1..2208: mol_type = other DNA
atggctgccgatggttatcttccagattggctcgaggacaaccttagtgaaggaattcgcgagtggtgggctttgaaacctggagcccctcaacccaaggcaaatcaacaacatcaagacaacgctcgaggtcttgtgcttccgggttacaaataccttggacccggcaacggactcgacaagggggagccggtcaacgcagcagacgcggcggccctcgagcacgacaaggcctacgaccagcagctcaaggccggagacaacccgtacctcaagtacaaccacgccgacgccgagttccaggagcggctcaaagaagatacgtcttttgggggcaacctcgggcgagcagtcttccaggccaaaaagaggcttcttgaacctcttggtctggttgaggaagcggctaagacggctcctggaaagaagaggcctgtagagcagtctcctcaggaaccggactcctccgcgggtattggcaaatcgggtgcacagcccgctaaaaagagactcaatttcggtcagactggcgacacagagtcagtcccagaccctcaaccaatcggagaacctcccgcagccccctcaggtgtgggatctcttacaatggcttcaggtggtggcgcaccagtggcagacaataacgaaggtgccgatggagtgggtagttcctcgggaaattggcattgcgattcccaatggctgggggacagagtcatcaccaccagcacccgaacctgggccctgcccacctacaacaatcacctctacaagcaaatctccaacagcacatctggaggatcttcaaatgacaacgcctacttcggctacagcaccccctgggggtattttgacttcaacagattccactgccacttctcaccacgtgactggcagcgactcatcaacaacaactggggattccggcctaagcgactcaacttcaagctcttcaacattcaggtcaaagaggttacggacaacaatggagtcaagaccatcgccaataaccttaccagcacggtccaggtcttcacggactcagactatcagctcccgtacgtgctcgggtcggctcacgagggctgcctcccgccgttcccagcggacgttttcatgattcctcagtacgggtatctgacgcttaatgatggaagccaggccgtgggtcgttcgtccttttactgcctggaatatttcccgtcgcaaatgctaagaacgggtaacaacttccagttcggctacgagtttgagaacgtacctttccatagcagctacgctcacagccaaagcctggaccgactaatgaatccactcatcgaccaatacttgtactatctctcaaagactattaacggttctggacagaatcaacaaacgctaaaattcagtgtggccggacccagcaacatggctgtccagggaagaaactacatacctggacccagctaccgacaacaacgtgtctcaaccactgtgactcaaaacaacaacagcgaatttgcttggcctggagcttcttcttgggctctcaatggacgtaatagcttgatgaatcctggacctgctatggccagccacaaagaaggagaggaccgtttctttcctttgtctggatctttaatttttggcaaacaaggaactggaagagacaacgtggatgcggacaaagtcatgataaccaacgaagaagaaattaaaactactaacccggtagcaacggagtcctatggacaagtggccacaaaccaccagagtgcccaagcacaggcgcagaccggctgggttcaaaaccaaggaatacttccgggtatggtttggcaggacagagatgtgtacctgcaaggacccatttgggccaaaattcctcacacggacggcaactttcacccttctccgctgatgggagggtttggaatgaagcacccgcctcctcagatcctcatcaaaaacacacctgtacctgcggatcctccaacggccttcaacaaggacaagctgaactctttcatcacccagtattctactggccaagtcagcgtggagatcgagtgggagctgcagaaggaaaacagcaagcgctgggacccggagatccagtacacttccaactattacaagtctaataatgttgaatttgctgttaatactgaaggtgtatatagtgaaccccgccccattggcaccagatacctgactcgtaatctg

SEQ ID NO: 630 - DNA, 2208 bp, synthetic construct
  misc_feature 1..2208: note = Description of Artificial Sequence: Synthetic polynucleotide
  source 1..2208: mol_type = other DNA
atggctgccgatggttatcttccagattggctcgaggacaaccttagtgaaggaattcgcgagtggtgggctttgaaacctggagcccctcaacccaaggcaaatcaacaacatcaagacaacgctcgaggtcttgtgcttccgggttacaaataccttggacccggcaacggactcgacaagggggagccggtcaacgcagcagacgcggcggccctcgagcacgacaaggcctacgaccagcagctcaaggccggagacaacccgtacctcaagtacaaccacgccgacgccgagttccaggagcggctcaaagaagatacgtcttttgggggcaacctcgggcgagcagtcttccaggccaaaaagaggcttcttgaacctcttggtctggttgaggaagcggctaagacggctcctggaaagaagaggcctgtagagcagtctcctcaggaaccggactcctccgcgggtattggcaaatcgggtgcacagcccgctaaaaagagactcaatttcggtcagactggcgacacagagtcagtcccagaccctcaaccaatcggagaacctcccgcagccccctcaggtgtgggatctcttacaatggcttcaggtggtggcgcaccagtggcagacaataacgaaggtgccgatggagtgggtagttcctcgggaaattggcattgcgattcccaatggctgggggacagagtcatcaccaccagcacccgaacctgggccctgcccacctacaacaatcacctctacaagcaaatctccaacagcacatctggaggatcttcaaatgacaacgcctacttcggctacagcaccccctgggggtattttgacttcaacagattccactgccgcttctcaccacgtgactggcagcgactcatcaacaacaactggggattccggcctaagcgactcaacttcaagctcttcaacattcaggtcaaagaggttacggacaacaatggagtcaagaccatcgccaataaccttaccagcacggtccaggtcttcacggactcagactatcagctcccgtacgtgctcgggtcggctcacgagggctgcctcccgccgttcccagcggacgttttcatgattcctcagtacgggtatctgacgcttaatgatggaagccaggccgtgggtcgttcgtccttttactgcctggaatatttcccgtcgcaaatgctaagaacgggtaacaacttccagttcagctacgagtttgagaacgtacctttccatagcagctacgctcacagccaaagcctggaccgactaatgaatccactcatcgaccaatacttgtactatctctcaaagactattaacggttctggacagaatcaacaaacgctaaaattcagtgtggccggacccagcaacatggctgtccagggaagaaactacatacctggacccagctaccgacaacaacgtgtctcaaccactgtgactcaaaacaacaacagcgaatttgcttggcctggagcttcttcttgggctctcaatggacgtaatagcttgatgaatcctggacctgctatggccagccacaaagaaggagaggaccgtttctttcctttgtctggatctttaatttttggcaaacaaggaactggaagagacaacgtggatgcggacaaagtcatgataaccaacgaagaagaaattaaaactactaacccggtagcaacggagtcctatggacaagtggccacaaaccaccagagtgcccaagcacaggcgcagaccggctgggttcaaaaccaaggaatacttccgggtatggtttggcaggacagagatgtgtacctgcaaggacccatttgggccaaaattcctcacacggacggcaactttcacccttctccgctgatgggagggtttggaatgaagcacccgcctcctcagatcctcatcaaaaacgcccctgtacctgcggatcctccaacggccttcaacaaggacaagctgaactctttcatcacccagtattctactggccaagtcagcgtggagatcgagtgggagctgcagaaggaaaacagcaagcgctggaacccggagatccagtacacttccaactattacaagtctaataatgttgaatttgctgttaatactgaaggtgtatatagtgaaccccgccccattggcaccagatacctgactcgtaatctg

SEQ ID NO: 631 - DNA, 2208 bp, synthetic construct
  misc_feature 1..2208: note = Description of Artificial Sequence: Synthetic polynucleotide
  source 1..2208: mol_type = other DNA
atggctgccgatggttatcttccagattggctcgaggacaaccttagtgaaggaattcgcgagtggtgggctttgaaacctggagcccctcaacccaaggcaaatcaacaacatcaagacaacgctcgaggtcttgtgcttccgggttacaaataccttggacccggcaacggactcgacaagggggagccggtcagcgcagcagacgcggcggccctcgagcacgacaaggcctacgaccagcagctcaaggccggagacaacccgtacctcaagtacaaccacgccgacgccgagttccaggagcggctcaaagaagatacgtcttttgggggcaacctcgggcgagcagtcttccaggccaaaaagaggcttcttgaacctcttggtctggttgaggaagcggctaagacggctcctggaaagaagaggcctgtagagcagtctcctcaggaaccggactcctccgcgggtattggcaaatcgggtgcacagcccgctaaaaagagactcaatttcggtcagactggcgacacagagtcagtcccagaccctcaaccaatcggagaacctcccgcagccccctcaggtgtgggatctcttacaatggcttcaggtggtggcgcaccagtggcagacaataacgaaggtgccgatggagtgggtagttcctcgggaaattggcattgcgattcccaatggctgggggacagagtcatcaccaccagcacccgaacctgggccctgcccacctacaacaatcacctctacaagcaaatctccaacagcacatctggaggatcttcaaatgacaacgcctacttcggctacagcaccccctgggggtattttgacttcaacagattccactgccacttctcaccgcgtgactggcagcgactcatcaacaacaactggggattccggcctaagcgactcaacttcaagctcttcaacattcaggtcaaagaggttacggacaacaatggagtcaagaccatcgccaataaccttaccagcacggtccaggtcttcacggactcagactatcagctcccgtacgtgctcgggtcggctcacgagggctgcctcccgccgttcccagcggacgttttcatgattcctcagtacgggtatctgacgcttaatgatggaagccaggccgtgggtcgttcgtccttttactgcctggaatatttcccgtcgcaaatgctaagaacgggtaacaacttccagttcagctacgagtttgagaacgtacctttccatagcagctacgctcacagccaaagcctggaccgactaatgaatccactcatcgaccaatacttgtactatctctcaaagactattaacggttctggacagaatcaacaaacgctaaaattcagtgtggccggacccagcaacatggctgtccagggaagaaactacatacctggacccagctaccgacaacaacgtgtctcaaccactgtgactcaaaacaacaacagcgaatttgcttggcctggagcttcttcttgggctctcaatggacgtaatagcttgatgaatcctggacctgctatggccagccacaaagaaggagaggaccgtttctttcctttgtctggatctttaatttttggcaaacaaggaactggaagagacaacgtggatgcggacaaagtcatgataaccaacgaagaagaaattaaaactactaacccggtagcaacggagtcctatggacaagtggccacaaaccaccagagtgcccaagcacaggcgcagaccggctgggttcaaaaccaaggaatacttccgggtatggtttggcaggacagagatgtgtacctgcaaggacccatttgggccaaaattcctcacacggacggcaactttcacccttctccgctgatgggagggtttggaatgaagcacccgcctcctcagatcctcatcaaaaacacacctgtacctgcggatcctccaacggccttcaacaaggacaagctgaactctttcatcacccagtattctactggccaagtcagcgtggagatcgagtgggagctgcagaaggaaaacagcaagcgctggaacccggagatccagtacacttccaactattacaagtctaataatgttgaatttgctgttaatactgaaggtgtatatagtgaaccccgccccattggcaccagatacctgactcgtaatctg

SEQ ID NO: 632 - DNA, 2208 bp, synthetic construct
  misc_feature 1..2208: note = Description of Artificial Sequence: Synthetic polynucleotide
  source 1..2208: mol_type = other DNA
atggctgccgatggttatcttccagattggctcgaggacaaccttagtgaaggaattcgcgagtggtgggctttgaaacctggagcccctcaacccaaggcaaatcaacaacatcaagacaacgctcgaggtcttgtgcttccgggttacaaataccttggacccggcaacggactcgacaagggggagccggtcaacgcagcagacgcggcggccctcgagcacgacaaggcctacgaccagcagctcaaggccggagacaacccgtacctcaagtacaaccacgccgacgccgagttccaggagcggctcaaagaagatacgtcttttgggggcaacctcgggcgagcagtcttccaggccaaaaagaggcttcttgaacctcttggtctggttgaggaagcggctaagacggctcctggaaagaagaggcctgtagagcagtctcctcaggaaccggactcctccgcgggtattggcaaatcgggtgcacagcccgctaaaaagagactcaatttcggtcagactggcgacacagagtcagtcccagaccctcaaccaatcggagaacctcccgcagccccctcaggtgtgggatctcttacaatggcttcaggtggtggcgcaccagtggcagacaataacgaaggtgccgatggagtgggtagttcctcgggaaattggcattgcgattcccaatggctgggggacagagtcatcaccaccagcacccgaacctgggccctgcccacctacaacaatcacctctacaagcaaatctccaacagcacatctggaggatcttcaaatgacaacgcctacttcggctacagcaccccctgggggtattttgacttcaacagattccactgccacttctcaccacgtgactggcagcgactcatcaacaacaactggggattccggcctaagcgactcaacttcaagctcttcaacattcaggtcaaagaggttacggacaacaatggagtcaagaccatcgccaataaccttaccagcacggtccaggtcttcacggactcagactatcagctcccgtacgtgctcgggtcggctcacgagggctgcctcccgccgttcccagcggacgttttcatgattcctcagtacgggtatctgacgcttaatgatggaagccaggccgtgggtcgttcgtccttttactgcctggaatatttcccgtcgcaaatgctaagaacgggtaacaacttccagttcagctacgagtttgagaacgtacctttccatagcagctacgctcacagccaaagcctggaccgactaatgaatccactcatcgaccaatacttgtactatctctcaaagactattaacggttctggacagaatcaacaaacgctaaaattcagtgtggccggacccagcaacacggctgtccagggaagaaactacatacctggacccagctaccgacaacaacgtgtctcaaccactgtgactcaaaacaacaacagcgaatttgcttggcctggagcttcttcttgggctctcaatggacgtaatagcttgatgaatcctggacctgctatggccagccacaaagaaggagaggaccgtttctttcctttgtctggatctttaatttttggcaaacaaggaactggaagagacaacgtggatgcggacaaagtcatgataaccaacgaagaagaaattaaaactactaacccggtagcaacggagtcctatggacaagtggccacaaaccaccagagtgcccaagcacaggcgcagaccggctgggttcaaaaccaaggaatacttccgggtatggtttggcaggacagagatgtgtacctgcaaggacccatttgggccaaaattcctcacacggacggcaactttcacccttctccgctgatgggagggtttggaatgaagcacccgcctcctcagatcctcatcaaaaacacacctgtacctgcggatcctccaacggccttcaacaaggacaagctgaactctttcatcacccagtattctactggccaagtcagcgtggagatcgagtgggagctgcagaaggaaaacagcaagcgctggaacccggagatccagtacacttccaactattacaagtctaataatgttgaatttgctgttaatactgaaggtgtatatagtgaaccccgccccattggcaccagatacctgactcgtaatctg

SEQ ID NO: 633 - DNA, 2208 bp, synthetic construct
  misc_feature 1..2208: note = Description of Artificial Sequence: Synthetic polynucleotide
  source 1..2208: mol_type = other DNA
atggctgccgatggttatcttccagattggctcgaggacaaccttagtgaaggaattcgcgagtggtgggctttgaaacctggagcccctcaacccaaggcaaatcaacaacatcaagacaacgctcgaggtcttgtgcttccgggttacaaataccttggacccggcaacggactcgacaagggggagccggtcaacgcagcagacgcggcggccctcgagcacgacaaggcctacgaccagcagctcaaggccggagacaacccgtacctcaagtacaaccacgccgacgccgagttccaggagcggctcaaagaagatacgtcttttgggggcaacctcgggcgagcagtcttccaggccaaaaagaggcttcttgaacctcttggtctggttgaggaagcggctaagacggctcctggaaagaagaggcctgtagagcagtctcctcaggaaccggactcctccgcgggtattggcaaatcgggtgcacagcccgctaaaaagagactcaatttcggtcagactggcgacacagagtcagtcccagaccctcaaccaatcggagaacctcccgcagccccctcaggtgtgggatctcttacaatggcttcaggtggtggcgcaccagtggcagacaataacgaaggtgccgatggagtgggtagttcctcgggaaattggcattgcgattcccaatggctgggggacagagtcatcaccaccagcacccgaacctgggccctgcccacctacaacaatcacctctacaagcaaatctccaacagcacatctggaggatcttcaaatgacaacgcctacttcggctacagcaccccctgggggtattttgacttcaacagattccactgccacttctcaccacgtgactggcagcgactcatcaacaacaactggggattccggcctaagcggctcaacttcaagctcttcaacattcaggtcaaagaggttacggacaacaatggagtcaagaccatcgccaataaccttaccagcacggtccaggtcttcacggactcagactatcagctcccgtacgtgctcgggtcggctcacgagggctgcctcccgccgttcccagcggacgttttcatgattcctcagtacgggtatctgacgcttaatgatggaagccaggccgtgggtcgttcgtccttttactgcctggaatatttcccgtcgcaaatgctaagaacgggtagcaacttccagttcagctacgagtttgagaacgtacctttccatagcagctacgctcacagccaaagcctggaccgactaatgaatccactcatcgaccaatacttgtactatctctcaaagactattaacggttctggacagaatcaacaaacgctaaaattcagtgtggccggacccagcaacatggctgtccagggaagaaactacatacctggacccagctaccgacaacaacgtgtctcaaccactgtgactcaaaacaacaacagcgaatttgcttggcctggagcttcttcttgggctctcaatggacgtaatagcttgatgaatcctggacctgctatggccagccacaaagaaggagaggaccgtttctttcctttgtctggatctttaatttttggcaaacaaggaactggaagagacaacgtggatgcggacaaagtcatgataaccaacgaagaagaaattaaaactactaacccggcagcaacggagtcctatggacaagtggccacaaaccaccagagtgcccaagcacaggcgcagaccggctgggttcaaaaccaaggaatacttccgggtatggtttggcaggacagagatgtgtacctgcaaggacccatttgggccaaaattcctcacacggacggcaactttcacccttctccgctgatgggagggtttggaatgaagcacccgcctcctcagatcctcatcaaaaacacacctgtacctgcggatcctccaacggccttcaacaaggacaagctgaactctttcatcacccagtattctactggccaagtcagcgtggagatcgagtgggagctgcagaaggaaaacagcaagcgctggaacccggagatccagcacacttccaactattacaagtctaataatgttgaatttgctgttaatactgaaggtgtatatagtgaaccccgccccattggcaccagatacctgactcgtaatctg

SEQ ID NO: 634 - DNA, 2208 bp, synthetic construct
  misc_feature 1..2208: note = Description of Artificial Sequence: Synthetic polynucleotide
  source 1..2208: mol_type = other DNA
atggctgccgatggttatcttccagattggctcgaggacaaccttagtgaaggaattcgcgagtggtgggctttgaaacctggagcccctcaacccaaggcaaatcaacaacatcaagacaacgctcgaggtcttgtgcttccgggttacaaataccttggacccggcaacggactcgacaagggggagccggtcaacgcagcagacgcggcggccctcgagcacgacaaggcctacgaccagcagctcaaggccggagacaacccgtacctcaagtacaaccacgccgacgccgagttccaggagcggctcaaagaagatacgtcttttgggggcaacctcgggcgagcagtcttccaggccaaaaagaggcttcttgaacctcttggtctggttgaggaagcggctaagacggctcctggaaagaagaggcctgtagagcagtctcctcaggaaccggactcctccgcgggtattggcaaatcgggtgcacagcccgctaaaaagagactcaatttcggtcagactggcgacacagagtcagtcccagaccctcaaccaatcggagaacctcccgcagccccctcaggtgtgggatctcttacaatggcttcaggtggtggcgcaccagtggcagacaataacgaaggtgccgatggagtgggtagttcctcgggaaattggcattgcgattcccaatggctgggggacagagtcatcaccaccagcacccgaacctgggccctgcccacctacaacaatcacctctacaagcaaatctccaacagcacatctggaggatcttcaaatgacaacgcctacttcggctacagcaccccctgggggtattttgacttcaacagattccactgccacttctcaccacgtgactggcagcgactcatcaacaacaactggggattccggcctaagcgactcaacttcaggctcttcaacattcaggtcaaagaggttacggacaacaatggagtcaagaccatcgccaataaccttaccagcacggtccaggtcttcacggactcagactatcagctcccgtacgtgctcgggtcggctcacgagggctgcctcccgccgttcccagcggacgttttcatgattcctcagtacgggtatctgacgcttaatgatggaagccaggccgtgggtcgttcgtccttttactgcctggaatatttcccgtcgcaaatgctaagaacgggtaacaacttccagttcagctacgagtttgagaacgtacctttccatagcagctacgctcacagccaaagcctggaccgactaatgaatccactcatcgaccaatacttgtactatctctcaaagactattaacggttctggacagaatcaacaaacgctaaaattcagtgtggccggacccagcaacatggctgtccagggaagaaactacatacctggacccagctaccgacaacaacgtgtctcaaccactgtgactcaaaacaacaacagcgaatttgcttggcctggagcttcttcttgggctctcaatggacgtaatagcttgatgaatcctggacctgctatggccagccacaaagaaggagaggaccgtttctttcctttgtctggatctttaatttttggcaaacaaggaactggaagagacaacgtggatgcggacaaagtcatgataaccaacgaagaagaaattaaaactactaacccggtagcaacggagtcctatggacaagtggccacaaaccaccagagtgcccaagcacaggcgcagaccggctgggttcaaagccaaggaatacttccgggtatggtttggcaggacagagatgtgtacctgcaaggacccatttgggccaaaattcctcacacggacggcaactttcacccttctccgctgatgggagggtttggaatgaagcacccgcctccccagatcctcatcaaaaacacacctgtacctgcggatcctccaacggccttcaacaaggacaagctgaactctttcatcacccagtattctactggccaagtcagcgtggagatcgagtgggagctgcagaaggaaaacagcaagcgctggaacccggagatccagtacacttccaactattacaagtctaataatgttgaatttgctgttaatactgaaggtgtatatagtgaaccccgccccattggcaccagatacctgactcgtaatctg

SEQ ID NO: 635 - DNA, 2205 bp, synthetic construct
  misc_feature 1..2205: note = Description of Artificial Sequence: Synthetic polynucleotide
  source 1..2205: mol_type = other DNA
atggctgccgatggttatcttccagattggctcgaggacaaccttagtgaaggaattcgcgagtggtgggctttgaaacctggagcccctcaacccaaggcaaatcaacaacatcaagacaacgcccgaggtcttgtgcttccgggttacaaataccttggacccggcaacggactcgacaagggggagccggtcaacgcagcagacgcggcggccctcgagcacgacaaggcctacgaccagcagctcaaggccggagacaacccgtacctcaagtacaaccacgccgacgccgagttccaggagcggctcaaagaagatacgtcttttgggggcaacctcgggcgagcagtcttccaggccaaaaagaggcttcttgaacctcttggtctggttgaggaagcggctaagacggctcctggaaagaagaggcctgtagagcagtctcctcaggaaccggactcctccgcgggtattggcaaatcgggtgcacagcccgctaaaaagagactcaatttcggtcagactggcgacacagagtcagtcccagaccctcaaccaatcggagaacctcccgcagccccctcaggtgtgggatctcttacaatggcttcaggtggtggcgcaccagtggcagacaataacgaaggtgccgatggagtgggtagttcctcgggaaattggcattgcgattcccaatggctgggggacagagtcatcaccaccagcacccgaacctgggccctgcccacctacaacaatcacctctacaagcaaatctccaacagcacatctggaggatcttcaaatgacaacgcctacttcggctacagcaccccctggaggtattttgacttcaacagattccactgccacttctcaccacgtgactggcagcgactcatcaacaactggggattccggcctaagcgactcaacttcaagctcttcaacattcaggtcaaagaggttacggacaacaatggagtcaagaccatcgccaataaccttaccagcacggtccaggccttcacggactcagactatcagctcccgtacgtgctcgggtcggctcacgagggctgcctcccgccgttcccagcggacgttttcatgattcctcagtacgggtatctgacgcttaatgatggaagccaggccgtgggtcgttcgtccttttactgcctggaatatttcccgtcgcaaatgctaagaacgggtaacaacttccagttcagctacgagtttgagaacgtacctttccatagcagctacgctcacagccaaagcctggaccgactaatgaatccactcatcgaccaatacttgtactatctctcaaagactattaacggttctggacagaatcaacaaacgctaaaattcagtgtggccggacccagcaacatggctgtccagggaagaaactacatacctggacccagctaccgacaacaacgtgtctcaaccactgtgactcaaaacaacaacagcgaatttgcttggcctggagcttcttcttgggctctcaatggacgtaatagcttgatgaatcctggacctgctatggccagccacaaagaaggagaggaccgtttctttcctttgtctggatctttaatttttggcaaacaaggaactggaagagacaacgtggatgcggacaaagtcatgataaccaacgaagaagaaattaaaactactaacccggtagcaacggagtcctatggacaagtggccacaaaccaccagagtgcccaagcacaggcgcagaccggctgggttcaaaaccaaggaatacttccgggtatggtttggcaggacagagatgtgtacctgcaaggacccatttgggccaaaattcctcacacggacggcaactttcacccttctccgctgatgggagggtttggaatgaagcacccgcctcctcagatcctcatcaaaaacacacctgtacctgcggatcctccaacggccttcaacaaggacgagctgaactctttcatcacccagtattctactggccaagtcagcgtggagatcgagtgggagctgcagaaggaaaacagcaagcgctggaacccggagatccagtacacttccaactattacaagtctaataatgttgaatttgctgttaatactgaaggtgtatatagtgaaccccgccccattggcaccagatacctgactcgtaatctg

SEQ ID NO: 636 - DNA, 2205 bp, synthetic construct
  misc_feature 1..2205: note = Description of Artificial Sequence: Synthetic polynucleotide
  source 1..2205: mol_type = other DNA
atggctgccgatggttatcttccagattggctcgaggacaaccttagtgaaggaattcgcgagtggtgggctttgaaacctggagcccctcaacccaaggcaaatcaacaacatcaagacaacgctcgaggtcttgtgcttccgggttacaaataccttggacccggcaacggactcgacaagggggagccggtcaacgcagcagacgcggcggccctcgagcacgacaaggcctacgaccagcagctcaaggccggagacaacccgtacctcaagtacaaccacgccgacgccgagttccaggagcggctcaaagaagatacgtcttttgggggcaacctcgggcgagcagtcttccaggacaaaaagaggcttcttgaacctcttggtctggttgaggaagcggctaagacggctcctggaaagaagaggcctgtagagcagtctcctcaggaaccggactcctccgcgggtattggcaaatcgggtgcacagcccgctaaaaagagactcaatttcggtcagactggcgacacagagtcagtcccagaccctcaaccaatcggagaacctcccgcagccccctcaggtgtgggatctcttacaatggcttcaggtggtggcgcaccagtggcagacaataacgaaggtgccgatggagtgggtagttcctcgggaaattggcattgcgattcccaatggctgggggacagagtcatcaccaccagcacccgaacctgggccctgcccacctacaacaatcacctctacaagcaaatctccaacagcacatctggaggatcttcaaatgacaacgcctacttcggctacagcaccccctgggggtattttgacttcaacagattccactgccacttctcaccacgtgactggcagcgactcatcaacaactggggattccggcctaagcgactcaacttcaagctcttcaacattcaggtcaaagaggttacggacaacaatggagtcaagaccatcgccaataaccttaccagcacggtccaggtcttcacggactcagactatcagctcccgtacgtgctcgggtcggctcacgagggctgcctcccgccgttcccagcggacgttttcatgattcctcagtacgggtatctgacgcttaatgatggaagccaggccgtgggtcgttcgtccttttactgcctggaatatttcccgtcgcaaatgctaagaacgggtaacaacttccaattcagctacgagtttgagaacgtacctttccatagcagctacgctcacagccaaagcctggaccgactaatgaatccactcatcgaccaatacttgtactatctctcaaagactattaacggttctggacagaatcaacaaacgctaaaattcagtgtggccggacccagcaacatggctgtccagggaagaaactacatacctggacccagctaccgacaacaacgtgtctcaaccactgtgactcaaaacaacaacagcgaatttgcttggcctggagcttcttcttgggctctcaatggacgtaatagcttgatgaatcctggacctgctatggccagccacaaagaaggagaggaccgtttctttcctttgtctggatctttaatttttggcaaacaaggaactggaagagacaacgtggatgcggacaaagtcatgataaccaacgaagaagaaattaaaactactaacccggtagcaacggagtcctatggacaagtggccacaaaccaccagagtgcccaagcacaggcgcagaccggctgggttcaaaaccaaggaatacttccgggtatggtttggcaggacagagatgtgtacctgcaaggacccatttgggccaaaattcctcacacggacggcaactttcacccttctccgctgatgggagggtttggaatgaagcacccgcctcctcagatcctcatcaaaaacacacctgtacctgcggatcctccaacggccttcaacaaggacaagctgaactctttcatcacccagtattctactggccaagtcagcgtggagatcgagtgggagctgcagaaggaaaacagcaagcgctggaacccggagatccagtacacttccaactattacaagtctaataatgttgaatttgctgttaatactgaaggtgtatatagtgaaccccgccccattggcaccagatacctgactcgtaatctg

SEQ ID NO: 637 - DNA, 2208 bp, synthetic construct
  misc_feature 1..2208: note = Description of Artificial Sequence: Synthetic polynucleotide
  source 1..2208: mol_type = other DNA
atggctgccgatggttatcttccagattggctcgaggacaaccttagtgaaggaattcgcgagtggtgggctttgaaacctggagcccctcaacccaaggcaaatcaacaacatcaagacaacgctcgaggtcttgtgcttccgggttacaaataccttggacccggcaacggactcgacaagggggagccggtcaacgcagcagacgcggcggccctcgagcacgacaaggcctacgaccagcagctcaaggccggagacaacccgtacctcaagtacaaccacgccgacgccgagttccaggagcggctcaaagaagatacgtcttttgggggcaacctcgggcgagcagtcttccaggccaaaaagaggcttcttgaacctcttggtctggttgaggaagcggctaagacggctcctggaaagaagaggcctgtagagcagtctcctcaggaaccggactcctccgcgggtattggcaaatcgggtgcacagcccgctaaaaagagactcaatttcggtcagactggcgacacagagtcagtcccagaccctcaaccaatcggagaacctcccgcagccccctcaggtgtgggatctcttacaatggcttcaggtggtggcgcaccagtggcagacaataacgaaggtgccgatggagtgggtagttcctcgggaaattggcattgcgattcccaatggctgggggacagagccatcaccaccagcacccgaacctgggccctgcccacctacaacaatcacctctacaagcaaatctccaacagcacatctggaggatcttcaaatgacaacgcctacttcggctacagcaccccctgggggtattttgacttcaacagattccactgccacttctcaccacgtgactggcagcggctcatcaacaacaactggggattccggcctaagcgactcaacttcaagctcttcaacattcaggtcaaagaggttacggacaacaatggagtcaagaccatcgccaataaccttaccagcacggtccaggtcttcacggactcagactatcagctcccgtacgtgctcgggtcggctcacgagggctgcctcccgccgttcccagcggacgttttcatgattcctcagtacgggtatctgacgcttaatgatggaagccaggccgtgggtcgttcgtccttttactgcctggaatatttcccgtcgcaaatgctaagaacgggtaacaacttccagttcagctacgagtttgagaacgtacctttccatagcagctacgctcacagccaaagcctggaccgactaatgaatccactcatcgaccaatacttgtactatctctcaaagactattaacggttctggacagaatcaacaaacgctaaaattcagtgtggccggacccagcaacatggctgtccagggaagaaactacatacctggacccagctaccgacaacaacgtgtctcaaccactgtgactcaaaacaacaacagcgaatttgcttggcctggagcttcttcttgggctctcaatggacgtaatagcttgatgaatcctggacctgctatggccagccacaaagaaggagaggaccgtttctttcctttgtctggatctttaatttttggcaaacaaggaactggaagagacaacgtggatgcggacaaagtcatgacaaccaacgaagaagaaattaaaactactaacccggtagcaacggagtcctatggacaagtggccacaaaccaccagagtgcccaagcacaggcgcagaccggctgggttcaaaaccaaggaatacttccgggtatggtttggcaggacagagatgtgtacctgcaaggacccatttgggccaaaattcctcacacggacggcaactttcacccttctccgctgatgggagggtttggaatgaagcacccgcctcctcagatcctcatcaaaaacacacctgtacctgcggatcctccaacggccttcaacaaggacaagctgaactctttcatcacccagtattctactggccaagtcagcgtggagatcgagtgggagctgcagaaggaaaacagcaagcgctggaacccggagatccagtacacttccaactattacaagtctaataatgttgaatttgctgttaatactgaaggtgtatatagtgaaccccgccccattggcaccagatacctgactcgtaatctg

SEQ ID NO: 638 - DNA, 2208 bp, synthetic construct
  misc_feature 1..2208: note = Description of Artificial Sequence: Synthetic polynucleotide
  source 1..2208: mol_type = other DNA
atggctgccgatggttatcttccagattggctcgaggacaaccttagtgaaggaattcgcgagtggtgggctttgaaacctggagcccctcaacccaaggcaaatcaacaacatcaagacaacgctcgaggtcttgtgcttccgggttacaaataccttggacccggcaacggactcgacaagggggagccggtcaatgcagcagacgcggcggccctcgagcacgacaaggcctacgaccagcagctcaaggccggagacaacccgtacctcaagtacaaccacgccgacgccgagttccaggagcggctcaaagaagatacgtcttttgggggcaacctcgggcgagcagtcttccagaccaaaaagaggcttcttgaacctcttggtctggttgaggaagcggctaagacggctcctggaaagaagaggcctgtagagcagtctcctcaggaaccgggctcctccgcgggtattggcaaatcgggtgcacagcccgctaaaaagagactcaatttcggtcagactggcgacacagagtcagtcccagaccctcaaccaatcggagaacctcccgcagccccctcaggtgtgggatctcttacaatggcttcaggtggtggcgcaccagtggcagacaataacgaaggtgccgatggagtgggtagttcctcgggaaattggcattgcgattcccaatggctgggggacagagtcatcaccaccagcacccgaacctgggccctgcccacctacaacaatcacctctacaagcaaatctccaacagcacatctggaggatcttcaaatgacaacgcctacttcggctacagcaccccctgggggtattttgacttcaacagattccactgccacttctcaccacgtgactggcagcgactcatcaacaacaactggggattccggcctaagcgactcaacttcaagctcttcaacattcaggtcaaagaggttacggacaacaatggagtcaagaccatcgccaataaccttaccagcacggtccaggtcttcacggactcagactatcagctcccgtacgtgctcgggtcggctcacgagggctgcctcccgccgttcccagcggacgttttcatgattcctcagtacgggtatctgacgcttaatgatggaagccaggccgtgggtcgttcgtccttttactgcctggaatatttcccgtcgcaaatgctaagaacgggtaacaacttccagttcagctacgagtttgagaacgtacctttccatagcagctacgctcacagccaaagcctggaccgactaatgaatccactcatcgaccaatacttgcactatctctcaaagactattaacggttctggacagaatcaacaaacgctaaaattcagtgtggccggacccagcaacatggctgtccagggaagaaactacatacctggacccagctaccgacaacaacgtgtctcaaccactgtgactcaaaacaacaacagcgaatttgcttggcctggagcttcttcttgggctctcaatggacgtaatagcttgatgaatcctggacctgctatggccagccacaaagaaggagaggaccgtttctttcctttgtctggatctttaatttttggcaaacaaggaactggaagagacaacgtggatgcggacaaagtcatgataaccaacgaagaagaaattaaaactactaacccggtagcaacggagtcctatggacaagtggccacaaaccaccagagtgcccaagcacaggcgcagaccggctgggttcaaaaccaaggaatacttccgggtatggtttggcaggacagagatgtgtacctgcaaggacccatttgggccaaaattcctcacacggacggcaactttcacccttctccgctgatgggagggtttggaatgaagcacccgcctcctcagatcctcatcaaaaacacacctgtacctgcggatcctccaacggccttcaacaaggacaagctgaactctttcatcacccagtattctactggccaagtcagcgtggagatcgagtgggagctgcagaaggaaaacagcaagcgctggaacccggagatccagtacacttccaactattacaagtctaataatgttgaatttgctgttaatactgaaggtgtatatagtgaaccccgccccattggcaccagatacctgactcgtaatctg

SEQ ID NO: 639 - DNA, 2208 bp, synthetic construct
  misc_feature 1..2208: note = Description of Artificial Sequence: Synthetic polynucleotide
  source 1..2208: mol_type = other DNA
atggctgccgatggttattttccagattggctcgaggacaaccttagtgaaggaattcgcgagtggtgggctttgaaacctggagcccctcaacccaaggcaaatcaacaacatcaagacaacgctcgaggtcttgtgcttccgggttacaaataccttggacccggcaacggactcgacaagggggagccggtcaacgcagcagacgcggcggccctcgagcacgacaaggcctacgaccagcagctcaaggccggagacaacccgtacctcaagtacaaccacgccgacgccgagttccaggagcggctcaaagaagatacgtcttttgggggcaacctcgggcgagcagtcttccaggccaaaaagaggcttcttgaacctcttggtctggttgaggaagcggctaagacggctcctggaaagaagaggcctgtagagcagtctcctcaggaaccggactcctccgcgggtattggcaaatcgggtgcacagcccgctaaaaagagactcaatttcggtcagactggcgacacagagtcagtcccagaccctcaaccaatcggagaatctcccgcagccccctcaggtgtgggatctcttacaatggcttcaggtggtggcgcaccagtggcagacaataacgaaggtgccgatggagtgggtagttcctcgggaaattggcattgcgattcccaatggctgggggacagagtcatcaccaccagcacccgaacctgggccctgcccacctacaacaatcacctctacaagcaaatctccaacagcacatctggaggatcttcaaatgacaacgcctacttcggctacagcaccccctgggggtattttgacttcaacagattccactgccacttctcaccacgtgactggcagcgactcatcaacaacaactggggattccggcctaagcgactcaacttcaagctcttcaacattcaggtcaaagaggttacggacaacaatggagtcaagaccatcgccaataaccttaccagcacggtccaggtcttcacggactcagactatcagctcccgtacgtgctcgggtcggctcacgagggctgcctcccgccgttcccagcggacgttttcatgattcctcagtacgggtatctgacgcttaatgatggaagccaggccgtgggtcgttcgtccttttactgcctggaatatctcccgtcgcaaatgctaagaacgggtaacaacttccagttcagctacgagtttgagaacgtacctttccatagcagctacgctcacagccaaagcctggaccgactaatgaatccactcatcgaccaatacttgcactatctctcaaagactattaacggttctggacagaatcaacaaacgctaaaattcagtgtggccggacccagcaacatggctgtccagggaagaaactacatacctggacccagctaccgacaacaacgtgtctcaaccactgtgactcaaaacaacaacagcgaatttgcttggcctggagcttcttcttgggctctcaatggacgtaatagcttgatgaatcctggacctgctgtggccagccacaaagaaggagaggaccgtttctttcctttgtctggatctttaatttttggcaaacaaggaactggaagagacaacgtggatgcggacaaagtcatgataaccaacgaagaagaaattaaaactactaacccggtagcaacggagtcctatggacaagtggccacaaaccaccagagtgcccaagcacaggcgcagaccggctgggttcaaaaccaaggaatacttccgggtatggtttggcaggacagagatgtgtacctgcaaggacccatttgggccaaaattcctcacacggacggcaactttcacccttctccgctgatgggagggtttggaatgaagcacccgcctcctcagatcctcatcaaaaacacacctgtacctgcggatcctccaacggccttcaacaaggacaagctgaactctttcatcacccagtattctactggccaagtcagcgtggagatcgagtgggagctgcagaaggaaaacagcaagcgctggaacccggagatccagtacacttccaactattacaagtctaataatgttgaatttgctgttaatactgaaggtgtatatagtgaaccccgccccattggcaccagatacctgactcgtaatctg

SEQ ID NO: 640 - DNA, 2208 bp, synthetic construct
  misc_feature 1..2208: note = Description of Artificial Sequence: Synthetic polynucleotide
  source 1..2208: mol_type = other DNA
atggctgccgatggttatcttccagattggctcgaggacaaccttagtgaaggaattcgcgagtggtgggctttgaaacctggagcccctcaacccaaggcaaatcaacaacatcaagacaacgctcgaggtcttgtgcttccgggttacaaataccttggacccggcaacggactcgacaagggggagccggtcaacgcagcagacgcggcggccctcgagcacgacaaggcctacgaccagcagctcaaggccggagacaacccgtacctcaagtacaaccacgccgacgccgagttccaggagcggctcaaagaagatacgtcttttgggggcaacctcgggcgagcagtcttccaggccaaaaagaggcttcttgaacctcttggtccggttgaggaagcggctaagacggctcctggaaagaagaggcctgtagagcagtctcctcaggaaccggactcctccgcgggtattggcaaatcgggtgcacagcccgctaaaaagagactcaatttcggtcagactggcgacacagagtcagtcccagaccctcaaccaatcggagaacctcccgcagccccctcaggtgtgggatctcttacaatggcttcaggtggtggcgcaccagtggcagacaataacgaaggtgccgatggagtgggtagttcctcgggaaattggcattgcgattcccaatggctgggggacagagtcatcaccaccagcacccgaacctgggccctgcccacctacaacaatcacctctacaagcaaatctccaacagcacatctggaggatcttcaaatgacaacgcctacttcggctacagcaccccctgggggtattttgacttcaacagattccactgccacttctcaccacgtgactggcagcgactcatcaacaacaactggggattccggcctaagcgactcaacttcaagctcttcaacattcaggtcaaagaggttacggacaacaatggagtcaagaccatcgccaataaccttaccagcacggtccaggtcttcacggactcagactatcagctcccgtacgtgctcgggtcggctcacgagggctgcctcccgccgttcccagcggacgttttcatgattcctcagtacgggtatctgacgcttaatgatggaagccaggccgtgggtcgttcgtccttttactgcctggaatatttcccgtcgcaaatgctaagaacgggtaacaacttccagttcagctacgagtttgagaacgtacctttccatagcagctacgctcacagccaaagcctggaccgactaatgaatccactcatcgaccaatacttgtactatctctcaaagactattaacggttctggacagaatcaacaaacgctaaaattcagtgtggccggacccagcaacatggctgtccagggaagaaactacatacctggacccagctaccgacaacaacgtgtctcaaccactgtgactcaaaacaacaacagcgaatttgcttggcctggagcttcttcttgggctctcaatggacgtaatagcttgatgaatcctggacctgctatggccagccacaaagaaggagaggaccgtttctttcctttgtctggatctttaatttttggcaaacaaggaactggaagagacaacgtggatgcggacaaagtcatgataaccaacgaagaagaaattaaaactactaacccggtagcaacggagtcctatggacaagcggccacaaaccaccagagtgcccaagcacaggcgcagaccggctgggttcaaaaccaaggaatacttccgggtatggtttggcaggacagagatgtgtacctgcaaggacccatttgggccaaaattcctcacacggacggcaactttcacccttctccgctgatgggagggtttggaatgaagcacccgcctcctcagatcctcatcaaaaacacacctgtacctgcggatcctccaacggccttcaacaaggacaagctgaactctttcatcacccagtattctactggccaagtcagcgtggagatcgagtgggagctgcagaaggaaaacagcaagcgctggaacccggagatccagtacacttccaactattacaagtctaataatgttgaatttgctgttaatactgaaggtgtatatagtgaaccccgccccattggcaccagatacctgactcgtaatctg

SEQ ID NO: 641 - DNA, 2208 bp, synthetic construct
  misc_feature 1..2208: note = Description of Artificial Sequence: Synthetic polynucleotide
  source 1..2208: mol_type = other DNA
atggctgccgatggttatcttccagattggctcgaggacaaccttagtgaaggaattcgcgagtggtgggctttgaaacctggagcccctcaacccaaggcaaatcaacaacatcaagacaacgctcggggtcttgtgcttccgggttacaaataccttggacccggcaacggactcgacaagggggagccggtcaacgcagcagacgcggcggccctcgagcacgacaaggcctacgaccagcagctcaaggccggagacaacccgtacctcaagtacaaccacgccgacgccgagttccaggagcggctcaaagaagatacgtcttttgggggcaacctcgggcgagcagtcttccaggccaaaaagaggcttcttgaacctcttggtccggttgaggaagcggctaagacggctcctggaaagaagaggcctgtagagcagtctcctcaggaaccggactcctccgcgggtattggcaaatcgggtgcacagcccgctaaaaagagactcaatttcggtcagactggcgacacagagtcagtcccagaccctcaaccaatcggagaacctcccgcagccccctcaggtgtgggatctcttacaatggcttcaggtggtggcgcaccagtggcagacaataacgaaggtgccgatggagtgggtagttcctcgggaaattggcattgcgattcccaatggctgggggacagagtcatcaccaccagcacccgaacctgggccctgcccacctacaacaatcacctctacaagcaaatctccaacagcacatctggaggatcttcaaatgacaacgcctacttcggctacagcaccccctgggggtattttgacttcaacagattccactgccacttctcaccacgtgactggcggcgactcatcaacaacaactggggattccggcctaagcgactcaacttcaagctcttcaacattcaggtcaaagaggttacggacaacaatggagtcaagaccatcgccaataaccttaccagcacggtccaggtcttcacggactcagactatcagctcccgtacgtgctcgggtcggctcacgagggctgcctcccgccgttcccagcggacgttttcatgattcctcagtacgggtatctgacgcttaatgatggaagccaggccgtgggtcgttcgtccttttactgcctggaatatttcccgtcgcaaatgctaagaacgggtaacaacttccagttcagctacgagtttgagaacgtacctttccatagcagctacgctcacagccaaagcctggaccgactaatgaatccactcatcgaccaatacttgtactatctctcaaagactattaacggttctggacagaatcaacaaacgctaaaattcagtgtggccggacccagcaacatggctgtccagggaagaaactacatacctggacccagctaccgacaacaacgtgtctcaaccactgtgactcaaaacaacaacagcgaatttgcttggcctggagcttcttcttgggctctcaatggacgtaatagcttgatgaatcctggacctgctatggccagccacaaagaaggagaggaccgtttctttcctttgtctggatctttaatttttggcaaacaaggaactggaagagacaacgtggatgcggacaaagtcatgataaccaacgaagaagaaattaaaactactaacccggtagcaacggagtcctatggacaagtggccacaaaccaccagagtgcccaagcacaggcgcagaccggctgggttcaaaaccaaggaatacttccgggtatggtttggcaggacagagatgtgtacctgcaaggacccatttgggccaaaattcctcacacggacggcaactttcacccttctccgctgatgggagggtttggaatgaagcacccgcctcctcagatcctcatcaaaaacacacctgtacctgcggatcctccaacggccttcaacaaggacaagctgaactctttcatcacccagtattctactggccaagtcagcgtggagatcgagtgggagctgcagaaggaaaacagcaagcgctggaacccggagatccagtacacttccaactattacaagtctaataatgttgaatttgctgttaatactgaaggtgtatatagtgaaccccgccccattggcaccagatacctgactcgtaatctg

SEQ ID NO: 642 - DNA, 2208 bp, synthetic construct
  misc_feature 1..2208: note = Description of Artificial Sequence: Synthetic polynucleotide
  source 1..2208: mol_type = other DNA
atggctgccgatggttatcttccagattggctcgaggacaaccttagtgaaggaattcgcgagtggtgggctttgaaacctggagcccctcaacccaaggcaaatcaacaacatcaagacaacgctcgaggtcttgtgcttccgggttacaaataccttggacccggcaacggactcgacaagggggagccggtcaacgcagcagacgcggcggccctcgagcacgacaaggcctacgaccagcagctcaaggccggagacaacctgtacctcaagtacaaccacgccgacgccgagttccaggagcggctcaaagaagatacgtcttttgggggcaacctcgggcgagcagtcttccaggccaaaaagaggcttcttgaacctcttggtctggttgaggaagcggctaagacggctcctggaaagaagaggcctgtagagcagtctcctcaggaaccggactcctccgcgggtattggcaaatcgggtgcacagcccgctaaaaagagactcaatttcggtcagactggcgacacagagtcagtcccagaccctcaaccaatcggagaacctcccgcagccccctcaggtgtgggatctcttacaatggcttcaggtggtggcgcaccagtggcagacaataacgaaggtgccgatggagtgggtagttcctcgggaaattggcattgcgattcccaatggctgggggacagagtcatcaccaccagcacccgaacctgggccctgcccacctacaacaatcacctctacaagcaaatctccaacagcacatctggaggatcttcaaatgacaacgcctacttcggctacagcaccccctgggggtattttgacttcaacagattccactgccacttctcaccacgtgactggcagcgactcatcaacaacaactggggattccggcctaagcgactcaacttcaagctcttcaacattcaggtcaaagaggttacggacaacaatggagtcaagaccatcgccaataaccttaccagcacggtccaggtcttcacggactcagactatcagctcccgtacgtgctcgggtcggctcacgagggctgcctcccgccgttcccagcggacgttttcatgattcctcagtacgggtatctgacgcttaatgatggaagccaggccgtgggtcgttcgtccttttactgcctggaatatttcccgtcgcaaatgctaagaacgggtaacaacttccagttcagctacgagtttgagaacgtacctttccatagcagctacgctcacagccaaagcctggaccgactaatgaatccactcatcgaccaatacttgcactatctctcaaagactattaacggttctggacagaatcaacaaacgctaaaattcagtgtggccggacccagcaacatggctgtccagggaagaaactacatacctggacccagctaccgacaacaacgtgtctcaaccactgtgactcaaaacaacaacagcgaatttgcttggcctggagcttcttcttgggctctcaatggacgtaatagcttgatgaatcctggacctgctatggccagccacaaagaaggagaggaccgtttctttcctttgtctggatctttaatttttggcaaacaaggaactggaagagacaacgtggatgcggacaaagtcatgataaccaacgaagaagaaattaaaactactaacccggtagcaacggagtcctatggacaagtggccacaaaccaccagagtgcccaagcacaggcgcagaccggctgggttcaaaaccaaggaatacttccgggtatggtttggcaggacagagatgtgtacctgcaaggacccatttgggccaaaattcctcacacggacggcaactttcacccttctccgctgatgggagggtttggaatgaagcacccgcctcctcagatcctcatcaaaaacacacctgtacctgcggatcctccaacggccttcaacaaggacaagctgaactctttcatcacccagtattctactggccaagtcagcgtggagatcgagtgggagctgcagaaggaaaacagcaagcgctggaacccggagatccagtacacttccaactattacaagtctaataatgttgaatttgctgttaatactgaaggtgtatatagtgaaccccgccccattggcaccagatacctgactcgtaatctg

SEQ ID NO: 643 - DNA, 2208 bp, synthetic construct
  misc_feature 1..2208: note = Description of Artificial Sequence: Synthetic polynucleotide
  source 1..2208: mol_type = other DNA
atggctgccgatggttatcttccagattggctcgaggacaaccttagtgaaggaattcgcgagtggtgggctttgaaacctggagcccctcaacccaaggcaaatcaacaacatcaagacaacgctcgaggtcttgtgcttccgggttacaaataccttggacccggcaacggactcgacaagggggagccggtcaacgcagcagacgcggcggccctcgagcacgacaaggcctacgaccagcagctcaaggccggagacaacccgtacctcaagtacaaccacgccgacgccgagttccaggagcggctcaaagaagatacgtcttttgggggcaacctcgggcgagcagtcttccaggccaaaaagaggcttcttgaacctcttggtctggttgaggaagcggctaagacggctcctggaaagaagaggcctgtagagcagtctcctcaagaaccggactcctccgcgggtattggcaaatcgggtgcacagcccgctaaaaagagactcaatttcggtcagactggcgacacagagtcagtcccagaccctcaaccaatcggagaacctcccgcagccccctcaggtgtgggatctcttacaatggcttcaggtggtggcgcaccagtggcagacaataacgaaggtgccgatggagtgggtagttcctcgggaaattggcattgcgattcccaatggctgggggacagagtcatcaccaccagcacccgaacctgggccctgcccacctacaacaatcacctctacaagcaaatctccaacagcacatctggaggatcttcaaatgacaacgcctacttcggctacagcaccccctgggggtattttgacttcaacagattccactgccacttctcaccacgtgactggcagcgactcatcaacaacaactggggattccggcctaagcgactcaacttcaagctcttcaacattcaggtcaaagaggttacggacaacaatggagtcaagaccatcgccaataaccttaccagcacggtccaggtcttcacggactcagactatcagctcccgtacgtgctcgggtcggctcacgagggctgcctcccgccgttcccagcggacgttttcatgattcctcagtacgggtatctgacgcttaatgatggaagccaggccgtgggtcgttcgtccttttactgcctggaatatttcccgtcgcaaatgctaagaacgggtaacaacttccagttcagctacgagtttgagaacgtacctttccatagcagctacgctcacagccaaagcctggaccgactaatgaatccactcatcgaccaatacttgcactatctctcaaagactattaacggttctggacagaatcaacaaacgctaaaattcagtgtggccggacccagcaacatggctgtccagggaagaaactacatacctggacccagctaccgacaacaacgtgtctcaaccactgtgactcaaaacaacaacagcgaatttgcttggcctggagcttcttcttgggctctcaatggacgtaatagcttgatgaatcctggacctgctatggccagccacaaagaaggagaggaccgtttctttcctttgtctggatctttaatttttggcaaacaaggaactggaagagacaacgtggatgcggacaaagtcatgataaccaacgaagaagaaattaaaactactaacccggtagcaacggagtcctatggacaagtggccacaaaccaccagagtgcccaagcacaggcgcagaccggctgggttcaaaaccaaggaatacttccgggtatggtttggcaggacagagatgtgtacctgcaaggacccatttgggccaaaattcctcacacggacggcaactttcacccttctccgctgatgggagggtttggaatgaagcacccgcctcctcagatcctcatcaaaaacacacctgtacctgcggatcctccaacggccttcaacaaggacaagctgaactctttcatcacccagtattctactggccaagtcagcgtggagatcgagtgggagctgcagaaggaaaacagcaagcgctggaacccggagatccagtacacttccaactattacaagtctaataatgttgaatttgctgttaatactgaaggtgtatatagtgaaccccgccccattggcaccagatacctgactcgtaatctg

SEQ ID NO: 644 - DNA, 2208 bp, synthetic construct
  misc_feature 1..2208: note = Description of Artificial Sequence: Synthetic polynucleotide
  misc_difference 1325: note = modified_base - a, c, t, g, unknown or other
  source 1..2208: mol_type = other DNA
atggctgccgatggttatcttccagattggctcgaggacaaccttagtgaaggaattcgcgagtggtgggctttgaaacctggagcccctcaacccaaggcaaatcaacaacatcaagacaacgctcgaggtcttgtgcttccgggttacaaataccttggacccggcaacggactcgacaagggggagccggtcaacgcagcagacgcggcggccctcgagcacgacaaggcctacgaccagcagctcaaggccggagacaacccgtacctcaagtacaaccacgccgacgccgagttccaggagcggctcaaagaagatacgtcttttgggggcaacctcgggcgagcagtcttccaggccaaaaagaggcttcttgaacctcttggtctggttgaggaagcggctaagacggctcctggaaagaagaggcctgtagagcagtctcctcaggaaccggactcctccgcgggtattggcaaatcgggtgcacagcccgctaaaaagagactcaatttcggtcagactggcgacacagagtcagtcccagaccctcaaccaatcggagaacctcccgcagccccctcaggtgtgggatctcttacaatggcttcaggtggtggcgcaccagtggcagacaataacgaaggtgccgatggagtgggtagttcctcgggaaattggcattgcgattcccaatggctgggggacagagtcatcaccaccagcacccgaacctgggccctgcccacctacaacaatcacctctacaagcaaatctccaccagcacatctggaggatcttcaaatgacaacgcctacttcggctacagcaccccctgggggtattttgacttcaacagattccactgccacttctcaccacgtgactggcagcgactcatcaacaacaactggggattccggcctaagcgactcaacttcaagctcttcaacattcaggtcaaagaggttacggacaacaatggagtcaagaccatcgccaataaccttaccagcacggtccaggtcttcacggactcagactatcagctcccgtacgtgctcgggtcggctcacgagggctgcctcccgccgttcccagcggacgttttcatgattcctcagtacgggtatctgacgcttaatgatggaagccaggccgtgggtcgttcgtccttttactgcctggaatatttcccgtcgcaaatgctaagaacgggtaacaacttccagttcagctacgagtttgagaacgtacctttccatagcagctacgctcacagccaaagcctggaccgactaatgaatccactcatcgaccnatacttgcactatctctcaaagactattaacggttctggacagaatcaacaaacgctaaaattcagtgtggccggacccagcaacatggctgtccagggaagaaactacatacctggacccagctaccgacaacaacgtgtctcaaccactgtgactcaaaacaacaacagcgaatttgcttggcctggagcttcttcttgggctctcaatggacgtaatagcttgatgaatcctggacctgctatggccagccacaaagaaggagaggaccgtttctttcctttgtctggatctttaatttttggcaaacaaggaactggaagagacaacgtggatgcggacaaagtcatgataaccaacgaagaagaaattaaaactactaacccggtagcaacggagtcctatggacaagtggccacaaaccaccagagtgcccaagcacaggcgcagaccggctgggttcaaaaccaaggaatacttccggatatggtttggcaggacagagatgtgtacctgcaaggacccatttgggccaaaattcctcacacggacggcaactttcacccttctccgctgatgggagggtttggaatgaagcacccgcctcctcagatcctcatcaaaaacacacctgtacctgcggatcctccaacggccttcaacaaggacaagctgaactctttcatcacccagtattctactggccaagtcagcgtggagatcgagtgggagctgcagaaggaaaacagcaagcgctggaacccggagatccagtacacttccaactattacaagtctaataatgttgaatttgctgttaatactgaaggtgtatatagtgaaccccgccccattggcaccagatacctgactcgtaatctg

SEQ ID NO: 645 - DNA, 2208 bp, synthetic construct
  misc_feature 1..2208: note = Description of Artificial Sequence: Synthetic polynucleotide
  source 1..2208: mol_type = other DNA
atggctgccgatggttatcttccagattggctcgaggacaaccttagtgaaggaattcgcgagtggtgggctttgaaacctggagcccctcaacccaaggcaaatcaacaacatcaagacaacgctcgaggtcttgtgcttccgggttacaaataccttggacccggcaacggactcgacaagggggagccggtcaacgcagcagacgcggcggccctcgagcacgacaaggcctacgaccagcagctcaaggccggagacaacccgtacctcaagtacaaccacgccgacgccgagttccaggagcggctcaaagaagatacgtcttttgggggcaacctcgggcgagcagtcttccaggccaaaaagaggcttcttgaacctcttggtctggttgaggaagcggctaagacggctcctggaaagaagaggcctgtagagcagtctcctcaggaaccggactcctccgcgggtattggcaaatcgggtgcacagcccgctaaaaagagactcaatttcggtcagactggcgacacagagtcagtcccagaccctcaaccaatcggagaacctcccgcagccccctcaggtgtgggatctcttacaatggcttcaggtggtggcgcaccagtggcagacaataacgaaggtgccgatggagtgggtagttcctcgggaaattggcattgcgattcccaatggctgggggacagagtcatcaccaccagcacccgaacctgggccctgcccacctacaacaatcacctctacaagcaaatctccaacagcacatctggaggatcttcaaatgacaacgcctacttcggctacagcaccccctgggggtattttgacttcaacagattccactgccacttctcaccacgtgactggcagcgactcatcaacaacaactggggattccggcctaagcgactcaacttcaagctcttcaacattcaggtcaaagaggttacggacaacaatggagtcaagaccatcgccaataaccttaccagcacggtccaggtcttcacggactcagactatcagctcccgtacgtgctcgggtcggctcacgagggctgcctcccgccgttcccagcggacgttttcatgattcctcagtacgggtatctgacgcttaatgatggaagccaggccgtgggtcgttcgtccttttactgcctggaatatttcccgtcgcaaatgctaagaacgggtaacaacttccagttcagctacgagtttgagaacgtacctttccatagcagctacgctcacagccaaagcctggaccgactaatgaatccactcatcgaccaatacttgcactatctctcaaagactattaacggttctggacagaatcaacaaacgctaaaattcagtgtggccggacccagcaacatggctgtccagggaagaaactacatacctggacccagctaccgacaacaacgtgtctcaaccactgtgactcaaaacaacaacagcgaatttgcttggcctggagcttcttcttgggctctcaatggacgtaatagcttgatgaatcctggacctgctatggccagctacaaagaaggagaggacagtttctttcctttgtctggatctttaatttttggcaaacaaggaactggaagagacaacgtggatgcggacaaagtcatgataaccaacgaagaagaaattaaaactactaacccggtagcaacggagtcctatggacaagtggccacaaaccaccagagtgcccaagcacaggcgcagaccggctgggttcaaaaccaaggaatacttccgggtatggtttggcaggacagagatgtgtacctgcaaggacccatttgggccaaaattcctcacacggacggcaactttcacccttctccgctgatgggagggtttggaatgaagcacccgcctcctcagaccctcatcaaaaacacacctgtacctgcggatcctccaacggccttcaacaaggacaagctgaactctttcatcacccagtattctactggccaagtcagcgtggagatcgagtgggagctgcagaaggaaaacagcaagcgctggaacccggagatccagtacacttccaactattacaagtctaataatgttgaatttgctgttaatactgaaggtgtatatagtgaaccccgccccattggcaccagatacctgactcgtaatctg

SEQ ID NO: 646 - DNA, 2208 bp, synthetic construct; identical to SEQ ID NO: 629
  misc_feature 1..2208: note = Description of Artificial Sequence: Synthetic polynucleotide
  source 1..2208: mol_type = other DNA

SEQ ID NO: 647 - DNA, 2208 bp, synthetic construct
  misc_feature 1..2208: note = Description of Artificial Sequence: Synthetic polynucleotide
  source 1..2208: mol_type = other DNA
atggctgccgatggttatcttccagattggctcgaggacaaccttagtgaaggaattcgcgagtggtgggctttgaaacctggagcccctcaacccagggcaaatcaacaacatcaagacaacgctcgaggtcttgtgcttccgggttacaaataccttggacccggcaacggactcgacaagggggagccggtcaacgcagccgacgcggcggccctcgagcacgacaaggcctacgaccagcagctcaaggccggagacaacccgtacctcaagtacaaccacgccgacgccgagttccaggagcggctcaaagaagatacgtcttttgggggcaacctcgggcgagcagtcttccaggccaaaaagaggcttcttgaacctcttggtctggttgaggaagcggctaagacggctcctggaaagaagaggcctgtagagcagtctcctcaggaaccggactcctccgcgggtattggcaaatcgggtgcacagcccgctaaaaagagactcaatttcggtcagactggcgacacagagtcagtcccagaccctcaaccaatcggagaacctcccgcagccccctcaggtgtgggatctcttacaatggcttcaggtggtggcgcaccagtggcagacaataacgaaggtgccgatggagtgggtagttcctcgggaaattggcattgcgattcccaatggctgggggacagagtcatcaccaccagcacccgaacctgggccctgcccacctacaacaatcacctctacaagcaaatctccaacagcacatctggaggatcttcaaatgacaacgcctacttcggctacagcaccccctgggggtattttgacttcaacagattccactgccacttctcaccacgtgactggcagcgactcatcaacaacaactggggattccggcctaagcgactcaacttcaagctcttcaacattcaggtcaaagaggttacggacaacaatggagtcaagaccatcgccaataaccttaccagcacggtccaggtcttcacggactcagactgtcagctcccgtacgtgctcgggtcggctcacgagggctgcctcccgccgttcccagcggacgttttcatgattcctcagtacgggtatctgacgcttaatgatggaagccaggccgtgggtcgttcgtccttttactgcctggaatatttcccgtcgcaaatgctaagaacgggtaacaacttccagttcagctacgagtttgagaacgtacctttccatagcagctacgctcacagccaaagcctggaccgactaacgaatccactcatcgaccaatacttgtactatctctcaaagactattaacggttctggacagaatcaacaaacgctaaaattcagtgtggccggacccagcaacatggctgtccagggaagaaactacatacctggacccagctaccgacaacaacgtgtctcaaccactgtgactcaaaacaacaacagcgaatttgcttggcctggagcttcttcttgggctctcaatggacgtaatagcttgatgaatcctggacctgctatggccagccacaaagaaggagaggaccgtttctttcctttgtctggatctttaatttttggcaaacaaggaactggaagagacaacgtggatgcggacaaagtcatgataaccaacgaagaagaaattaaaactactaacccggtagcaacggagtcccatggacaagtggccacaaaccaccagagtgcccaagcacaggcgcagaccggctgggttcaaaaccaaggaatacttccgggtatggtttggcaggacagagatgtgtacctgcaaggacccatttgggccaaaattcctcacacggacggcaactttcacccttctccgctgatgggagggtttggaatgaagcacccgcctcctcagatcctcatcaaaaacacacctgtacctgcggatcctccaacggccttcaacaaggacaagctgaactctttcatcacccagtattctactggccaagtcagcgtggagatcgagtgggagctgcagaaggaaaacagcaagcgctggaacccggagatccagtacacttccaactattacaagtctaataatgttgaatttgctgttaatactgaaggtgtatatagtgaaccccgccccattggcaccagatacctgactcgtaatctg

SEQ ID NO: 648 - DNA, 2208 bp, synthetic construct
  misc_feature 1..2208: note = Description of Artificial Sequence: Synthetic polynucleotide
  source 1..2208: mol_type = other DNA
atggctgccgatggttatcttccagattggctcgaggacaaccttagtgaaggaattcgcgagtggtgggctttgaaacctggagcccctcaacccaaggcaaatcaacaacatcaagacaacgctcgaggtcttgtgcttccgggttacaaataccttggacccggcaacggactcgacaagggggagccggtcaacgcagcagacgcggcggccctcgagcacgacaaggcctacgaccagcagctcaaggccggagacaacccgtacctcaagtacaaccacgccgacgccgagttccaggagcggctcaaagaagatacgtcttttgggggcaacctcgggcgagcagtcttccaggccaaaaagaggcttcttgaacctcttggtctggttgaggaagcggctaagacggctcctggaaagaagaggcctgtagagcagtctcctcaggaaccggactcctccgcgggtattggcaaatcgggtgcacagcccgctaagaagagactcaatttcggtcagactggcgacacagagtcagtcccagaccctcaaccaatcggagaacctcccgcagccccctcaggtgtgggatctcttacaatggcttcaggtggtggcgcaccagtggcagacaataacgaaggtgccgatggagtgggtagttcctcgggaaattggcattgcgattcccaatggctgggggacagagtcatcaccaccagcacccgaacctgggccctgcccacctacaacaatcacctctacaagcaaatctccaacagcacatctggaggatcttcaaatgacaacgcctacttcggctacagcaccccctgggggtattttgacttcaacagattccactgccacttctcaccacgtgactggcagcgactcatcaacaacaactggggattccggcctaagcgactcaacttcaagctcttcaacattcaggtcaaagaggttacggacaacaatggagtcaagaccatcgccaataaccttaccagcacggtccaggtcttcacggactcagactatcagctcccgtacgtgctcgggtcggctcacgagggctgcctcccgccgttcccagcggacgttttcatgattcctcagtacgggtatctgacgcttaatgatggaagccaggccgtgggtcgttcgtccttttactgcctggaatatttcccgtcgcaaatgctaagaacgggtaacaacttccagttcagctacgagtttgagaacgtacctttccatagcagctacgctcacagccaaagcctggaccgactaatgaatccacccatcgaccaatacttgtactatctctcaaagactattaacggttctggacagaatcaacaaacgctaaaattcagtgtggccggacccagcaacatggctgtccagggaagaaactacatacctggacccagctaccgacaacaacgtgtctcaaccactgtgactcaaaacaacaacagcgaatttgcttggcctggagcttcttcttgggctctcaatggacgtaatagcttgatgaatcctggacctgctatggccagccacaaagaaggagaggaccgtttctttcctttgtctggatctttaatttttggcaaacaaggaactggaagagacaacgtggatgcggacaaagtcatgataaccaacgaagaagaaattaaaactactaacccggtagcaacggagtcctatggacaagtggccacaaaccaccagagtgcccaagcacaggcgcagaccggctgggttcaaaaccaaggaatacttccgggtatggtttggcaggacagagatgtgtacctgcaaggacccatttgggccaaaattcctcacacggacggcaactttcacccttctccgctgatgggagggtttggaatgaagcacccgcctcctcagatcctcatcaaaaacacacctgtacctgcggatcctccaacggccttcaacaaggacaagctgaactctttcatcacccagtattctactggccaagtcagcgtggagatcgagtgggagctgcagaaggaaaacagcaagcgctggaacccggagatccagtacacttccaactattacaagtctaataatgttgaatttgctgttaatactgaaggtgtatatggtgaaccccgccccattggcaccagatacctgactcgtaatctg

SEQ ID NO: 649 - DNA, 2208 bp, synthetic construct
  misc_feature 1..2208: note = Description of Artificial Sequence: Synthetic polynucleotide
  source 1..2208: mol_type = other DNA
atggctgccgatggttatcttccagattggctcgaggacaaccttagtgaaggaattcgcgagtggtgggctttgaaacctggagcccctcaacccaaggcaaatcaacaacatcaagacaacgctcgaggtcttgtgcttccgggttacaaataccttggacccggcaacggactcgacaagggggagccggtcaacgcagcagacgcggcggccctcgagcacgacaaggcctacgaccagcagctcaaggccggagacaacccgtacctcaagtacaaccacgccgacgccgagttccaggagcggctcaaagaagatacgtcttttgggggcaacctcgggcgagcagtcttccaggccaaaaagaggcttcttgaacctcttggtctggttgaggaagcggctaagacggctcctggaaagaagaggcctgtagagcagtctcctcaggaaccggactcctccgcgggtattggcaaatcgggtgcacagcccgctaaaaagagactcaatttcggtcagactggcgacacagagtcagtcccagaccctcaaccaatcggagaacctcccgcagccccctcaggtgtgggatctcttacaatggcttcaggtggtggcgcaccagtggcagacaataacgaaggtgccgatggagtgggtagttcctcgggaaattggcattgcgattcccaatggctgggggacagagtcatcaccaccagcacccgaacctgggccctgcccacctacaacaatcacctctacaagcaaatctccaacagcacatctggaggatcttcaaatgacaacgcctacttcggctacagcaccccctgggggtattttgacttcaacagattccactgccacttctcaccacgtgaccggcagcgactcatcaacaacaactggggattccggcctaagcgactcaacttcaagctcttcaacattcaggtcaaagaggttacggacaacaatggagtcaagaccatcgccaataaccttaccagcacggtccaggtcttcacggactcagactatcagctcccgtacgtgctcgggtcggctcacgagggctgcctcccgccgttcccagcggacgttttcatgattcctcagtacgggtatctgacgcttaatgatggaagccaggccgtgggtcgttcgtccttttactgcctggaatatttcccgtcgcaaatgctaagaacgggtaacaacttccagttcagctacgagtttgagaacgtacctttccatagcagctacgctcacagccaaagcctggaccgactaatgaatccactcatcgaccaatacttgtactatctctcaaagactattaacggttctggacagaatcaacaaacgctaaaattcagtgtggccggacccagcaacatggctgtccagggaagaaactacatacctggacccagctaccgacaacaacgtgtctcaaccactgtgactcaaaacaacaacagcgaatttgcttggcctggagcttcttcttgggctctcaatggacgtaatagcttgatgaatcctggacctgctatggccagccacaaagaaggagaggaccgtttctttcctttgtctggatctttaatttttggcaaacaaggaactggaagagacaacgtggatgcggacaaagtcatgataaccaacgaagaagaaattaaaactactaacccggtagcaacggagtcctatggacaagtggccacaaaccaccagagtgcccaagcacaggcgcagaccggctgggttcaaaaccaaggaatacttccgggtatggtttggcaggacagagatgtgtacctgcaaggacccatttgggccaaaattcctcacacggacggcaactttcacccttctccgctgatgggagggtttggaatgaagcacccgcctcctcagatcctcatcaaaaacacacctgtacctgcggatcctccaacggccttcaacaaggacaagctgaactctttcatcacccagtattctactggccaagtcagcgtggagatcgagtgggagctgcagaaggaaaacagcaagcgctggaacccggagatccagtacacttccaactattacaagtctaataatgttgaatttgctgttaatactgaaggtgtatatagtgaaccccgccccattggcaccagatacctgactcgtaatctg

SEQ ID NO: 650 - DNA, 2208 bp, synthetic construct
  misc_feature 1..2208: note = Description of Artificial Sequence: Synthetic polynucleotide
  source 1..2208: mol_type = other DNA
atggctgccgatggttatcttccagattggctcgaggacaaccttagtgaaggaattcgcgagtggtgggctttgaaacctggagcccctcaacccaaggcaaatcaacaacatcaagacaacgctcgaggtcttgtgcttccgggttacaaataccttggacccggcaacggactcgacaagggggagccggtcaacgcagcagacgcggcagccctcgagcacgacaaggcctacgaccagcagctcaaggccggagacaacccgtacctcaagtacaaccacgccgacgccgagttccaggagcggctcaaagaagatacgtcttttgggggcaacctcgggcgagcagtcttccaggccaaaaagaggcttcttgaacctcttggtctggttgaggaagcggctaagacggctcctggaaagaagaggcctgtagagcagtctcctcaggaaccggactcctccgcgggtattggcaaatcgggtgcacagcccgctaaaaagagactcaatttcggtcagactggcgacacagagtcagtcccagaccctcaaccaatcggagaacctcccgcagccccctcaggtgtgggatctcttacaatggcttcaggtggtggcgcaccagtggcagacaataacgaaggtgccgatggagtgggtagttcctcgggaaattggcattgcaattcccaatggctgggggacagagtcatcaccaccagcacccgaacctgggccctgcccacctacaacaatcacctctacaagcaaatctccaacagcacatctggaggatcttcaaatgacaacgcctacttcggctacagcaccccctgggggtattttgacttcaacagattccactgccacttctcaccacgtgactggcagcgactcatcaacaacaactggggattccggcctaagcgactcaacttcaagctcttcaacattcaggtcaaagaggttacggacaacaatggagtcaagaccatcgccaataaccttaccagcacggtccaggtcttcacggactcagactatcagctcccgtacgtgctcgggtcggctcacgagggctgcctcccgccgttcccagcggacgttttcatgattcctcagtacgggtatctgacgcttaatgatggaagccaggccgtgggtcgttcgtccttttactgcctggaatatttcccgtcgcaaatgctaagaacgggtaacaacttccagttcagctacgagtttgagaacgtacctttccatagcagctacgctcacagccaaagcctggaccgactaatgaatccactcatcgaccaatacttgtactatctctcaaagactattaacggttctggacagaatcaacaaacgctaaaattcagtgtggccggacccggcaacatggctgtccagggaagaaactacatacctggacccagctaccgacaacaacgtgtctcaaccactgtgactcaaaacaacaacagcgaatttgcttggcctggagcttcttcttgggctctcaatggacgtaatagcttgatgaatcctggacctgctatggccagccacaaagaaggagaggaccgtttctttcctttgtctggatctttaatttttggcaaacaaggaactggaagagacaacgtggatgcggacaaagtcatgataaccaacgaagaagaaattaaaactactaacccggtagcaacggagtcctatggacaagtggccacaaaccaccagagtgcccaagcacaggcgcagaccggctgggttcaaaaccaaggaatacttccgggtatggtttggcaggacagagatgtgtacctgcaaggacccatttgggccaaaattcctcacacggacggcaactttcacccttctccgctgatgggagggtttggaatgaagcacccgcctcctcagatcctcatcaagaacacacctgtacctgcggatcctccaacggccttcaacaaggacaagctgaactctttcatcacccagtattctactggccaagtcagcgtggagatcgagtgggagctgcagaaggaaaacagcaagcgctggaacccggagatccagtacacttccaactattacaagtctaataatgttgaatttgctgttaatactgaaggtgtatatagtgaaccccgccccattggcaccagatacctgactcgtaatctg

SEQ ID NO: 651 - DNA, 2208 bp, synthetic construct
  misc_feature 1..2208: note = Description of Artificial Sequence: Synthetic polynucleotide
  source 1..2208: mol_type = other DNA
atggctgccgatggttatcttccagattggctcgaggacaaccttagtgaaggaattcgcgagtggtgggctttgaaacctggagcccctcaacccaaggcaaatcaacaacatcaagacaacgctcgaggtcttgtgcttccgggttacagataccttggacccggcaacggactcgacaagggggagccggtcaacgcagcagacgcggcggccctcgagcacgacaaggcctacgaccagcagctcaaggccggagacaacccgtacctcaagtacaaccacgccgacgccgagttccaggagcggctcaaagaagatacgtcttttgggggtaacctcgggcgagcagtcttccaggccaaaaagaggcttcttgaacctcttggtctggttgaggaagcggctaagacggctcctggaaagaagaggcctgtagagcagtctcctcaggaaccggactcctccgcgggtatcggcaaatcgggtgcacagcccgctaaaaagagactcaatttcggtcagactggcgacacagagtcagtcccagaccctcaaccaatcggagaacctcccgcagccccctcaggtgtgggatctcttacaatggcttcaggtggtggcgcaccagtggcagacaataacgaaggtgccgatggagtgggtagttcctcgggaaattggcattgcgattcccaatggctgggggacagagtcatcaccaccagcacccgaacctgggccctgcccacctacaacaatcacctctacaagcaaatctccaacagcacatctggaggatcttcaaatgacaacgcctacttcggctacagcaccccctgggggtattttgacttcaacagattccactgccacttctcaccacgtgactggcagcgactcatcaacaacaactggggattccggcctaagcgactcaacttcaagctcttcaacattcaggtcaaagaggttacggacaacaatggagtcaagaccgtcgccaataaccttaccagcacggtccaggtcttcacggactcagactatcagctcccgtacgtgctcgggtcggctcacgagggctgcctcccgccgttcccagcggacgttttcatgattcctcagtacgggtatctgacgcttaatgatggaagccaggccgtgggtcgttcgtccttttactgcctggaatatttcccgtcgcaaatgctaagaacgggtaacaacttccagttcagctacgagtttgagaacgtacctttccatagcagctacgctcacagccaaagcctggaccgactaatgaatccactcatcgaccaatacttgtactatctctcaaagactattaacggttctggacagaatcaacaaacgctaaaattcagtgtggccggacccagcaacatggctgtccagggaagaaactacatacctggacccagctaccgacaacaacgtgtctcaaccactgtgactcaaaacaacaacagcgaatttgcttggcctggagcttcttcttgggctctcaatggacgtaatagcttgatgaatcctggacctgctatggccagccacaaagaaggagaggaccgtttctttcctttgtctggatctttaatttttggcaaacaaggaactggaagagacaacgtggatgcggacaaagtcatgataaccaacgaagaagaaattaaaactactaacccggtagcaacggagtcctatggacaagtggccacaaaccaccagagtgcccaagcacaggcgcagaccggctgggttcaaaaccaaggaatacttccgggtatggtttggcaggacagagatgtgtacctgcaaggacccatttgggccaaaattcctcacacggacggcaactttcacccttctccgctgatgggagggtttggaatgaagcacccgcctcctcagatcctcatcaaaaacacacctgtacctgcggatcctccaacggccttcaacaaggacaagctgaactctttcatcacccagtattctactggccaagtcagcgtggagatcgagtgggagctgcagaaggaaaacagcaagcgctggaacccggagatccagtacacttccaactattacaagtctaataatgttgaatttgctgttaatactgaaggtgtatatagtggaccccgccccattggcaccagatacctgactcgtaatctg

SEQ ID NO: 652 - DNA, 2208 bp, synthetic construct
  misc_feature 1..2208: note = Description of Artificial Sequence: Synthetic polynucleotide
  source 1..2208: mol_type = other DNA
atggctgccgatggttatcttccagattggctcgaggacaaccttagtgaaggaattcgcgagtggtgggctttgaaacctggagcccctcaacccaaggcaaatcaacaacatcaagacaacgctcgaggtcttgtgcttccgggttacaaataccttggacccggcaacggactcgacaagggggagccggtcaacgcagcagacgcggcggccctcgagcacgacaaggcctacgaccagcagctcaaggccggagacaacccgtacctcaagtacaaccacgccgacgccgagttccaggagcggctcaaagaagatacgtcttttgggggcaacctcgggcgagcagtcttccaggccaaaaagaggcttcttgaacctcttggtctggttgaggaagcggctaagacggctcctggaaagaagaggcctgtagagcagtctcctcaggaaccggactcctccgcgggtattggcaaatcgggtgcacagcccgctaaaaagagactcaatttcggtcagactggcgacacagagtcagtcccagaccctcaaccaatcggagaacctcccgcagccccctcaggtgtgggatctcttacaatggcttcaggtggtggcgcaccagtggcagacaataacgaaggtgccgatggagtgggtagttcctcgggaaattggcattgcgattcccaatggctgggggacagagtcatcaccaccagcacccgaacctgggccctgcccacctacaacaatcacctctacaagcaaatctccaacagcacatctggaggatcttcaaatgacaacgcctacttcggctacagcaccccctgggggtattttgacttcaacagattccactgccacttctcaccacgtgactggcagcgactcatcaacaacaactggggattccggcctaagcgactcaacttcaagctcttcaacattcaggtcaaagaggttacggacaacaatggagtcaagaccatcgccaataaccttaccagcacggtccaggtcttcacggactcagactatcagctcccgtacgtgctcgggtcggctcacgagggctgcctcccgccgttcccagcggacgttttcatgattcctcagtacgggtatctgacgcttaatgatggaagccaggccgtgggtcgttcgtccttttactgcctggaatatttcccgtcgcaaatgctaagaacgggtaacaacttccagttcagctacgagtttgagaacgtacctttccatagcagctacgctcacagccaaagcctggaccgactaatgaatccactcatcgaccaatacttgtactatctctcaaagactattaacggttctggacagaatcaacaaacgctaaaattcagtgtggccggacccagcaacatggctgtccagggaagaaactacatacctggacccagctaccgacaacaacgtgtctcaaccactgtgactcaaaacaacaacagcgaatttgcttggcctggagcttcttcttgggctctcaatggacgtaatagcttgatgaatcctggacctgctatggccagccacaaagaaggagaggaccgtttctttcctttgtctggatctttaatttttggcaaacaaggaactggaagagacaacgtggatgcggacaaagtcatgataaccaacgaagaagaaattaaaactactaacccggtagcaacggagtcctatggacaagtggccacaaaccaccagagtgcccaagcacaggcgcagaccggctgggttcaaaaccaaggaatacttccgggtatggtttggcaggacagagatgtgtacctgcaaggacccatttgggccaaaattcctcacacggacggcaactttcacccttctccgctgatgggagggtttggaatgaagcacccgcctcctcagatcctcatcaaaaacacacctgtacctgcggatcctccaacggccttcaacaaggacaagctgaactctttcatcacccagtattctactggccaagtcagcgtggagatcgagtgggagctgcagaaggaaaacagcaagcgctggaacccggagatccagtacacttccaactattacaagtctaataatgttgaatttgctgttaatactgaaggtgtatatagtgaaccccgccccattggcaccagatacctgactcgtaatctg

SEQ ID NO: 653 - DNA, 2208 bp, synthetic construct
  misc_feature 1..2208: note = Description of Artificial Sequence: Synthetic polynucleotide
  source 1..2208: mol_type = other DNA
atggctgccgatggttatcttccagattggctcgaggacaaccttagtgaaggaattcgcgagtggtgggctttgaaacctggagcccctcaacccaaggcaaatcaacaacgtcaagacaacgctcgaggtcttgtgcttccgggttacaaataccttggacccggcaacggactcgacaagggggagccggtcaacgcagcagacgcggcggccctcgagcacgacaaggcctacgaccagcagctcaaggccggaggcaacccgtgcctcaagtacaaccacgccgacgccgagttccaggagcggctcaaagaagatacgtcttttgggggcaacctcgggcgagcagtcttccaggccaaaaagaggcttcttgaacctcttggtctggttgaggaagcggctaagacggctcctggaaagaagaggcctgtagagcagtctcctcaggaaccggactcctccgcgggtattggcagatcgggtgcacagcccgctaaaaagagactcaatttcggtcagactggcgacacagagtcagtcccagaccctcaaccaatcggagaacctcccgcagccccctcaggtgtgggatctcttacaatggcttcaggtggtggcgcaccagtggcagacaataacgaaggtgccgatggagtgggtagttcctcgggaaattggcattgcgattcccaatggctgggggacagagtcatcaccaccagcacccgaacctgggccctgcccacctacaacaatcacctctacaagcaaatctccaacagcacatctggaggatcttcaaatgacaacgcctacttcggctacagcaccccctgggggtattttgacttcaacagattccactgccacttctcaccacgtgactggcagcgactcatcaacaacaactggggattccggcctaagcgactcaacttcaagctcttcaacattcaggtcaaagaggttacggacaacaatggagtcaaggccatcgccaataaccttaccagcacggtccaggtcttcacggactcagactatcagctcccgtacgtgctcgggtcggctcacgagggctgcctcccgccgttcccagcggacgttttcatgattcctcagtacgggtatctgacgcttaatgatggaagccaggccgtgggtcgttcgtccttttactgcctggaatatttcccgtcgcaaatgctaagaacgggtaacaacttccagttcagctacgagtttgagaacgtacctttccatagcagctacgctcacagccaaagcctggaccgactaatgaatccactcatcgaccaatacttgtactatctctcaaagactattgacggttctggacagaatcaacaaacgctaaaattcagtgtggccggacccagcaacatggctgtccagggaagaaactacatacctggacccagctaccgacaacaacgtgtctcaaccactgtgactcaaaacaacaacagcgaatttgcttggcctggagcttcttcttgggctctcaatggacgtaatagcttgatggatcctggacctgctatggccagccacaaagaaggagaggaccgtttctttcctttgtctggatctttaatttttggcaaacaaggaactggaagagacaacgtggatgcggacaaagtcatgataaccaacgaagaagaaattaaaactactaacccggtagcaacggagtcctatggacaagtggccacaaaccaccagagtgcccaagcacaggcgcagaccggctgggttcaaaaccaaggaatacttccgggtatggtttggcaggacagagatgtgtacctgcaaggacccatttgggccaaaattcctcacacgggcggcaactttcacccttctccgctgatgggagggtttggaatgaagcacccgcctcctcagatcctcatcaaaaacacacctgtacctgcggatcctccaacggccttcaacaaggacaagctgaactctttcatcacccagtattctactggccaagtcagcgtggagatcgagtgggagctgcagaaggaaaacagcaagcgctggaacccggagatccagtacacttccaactattacaagtctaataatgttgaatttgctgttaatactgaaggtgtatatagtgaaccccgccccattggcaccagatacctgactcgtaatctg

SEQ ID NO: 654 - DNA, 2208 bp, synthetic construct
  misc_feature 1..2208: note = Description of Artificial Sequence: Synthetic polynucleotide
  source 1..2208: mol_type = other DNA
atggctgccgatggttatcttccagattggctcgaggacaaccttagtgaaggaattcgcgagtggtgggctttgaaacctggagcccctcaacccaaggcaaatcaacaacatcaagacaacgctcgaggtcttgtgcttccgggttacaaataccttggacccggcaacggactcgacaagggggagccggtcaacgcagcagacgcggcggccctcgagcacgacaaggcctacgaccagcagctcaaggccggagacaacccgtacctcaagtacaaccacgccgacgccgagttccaggagcggctcaaagaagatacgtcttttgggggcaacctcgggcgagcagtcttccaggccaaaaagaggcttcttgaacctcttggtctggttgaggaagcggctaagacggctcctggaaagaagaggcctgtagagcagtctcctcaggaaccggactcctccgcgggtattggcaaatcgggtgcacagcccgctaaaaagagactcaatttcggtcagactggcgacacagagtcagtcccagaccctcaaccaatcggagaacctcccgcagccccctcaggtgtgggatctcttacaatggcttcaggtggtggcgcaccagtggcagacaataacgaaggtgccgatggagtgggtagttcctcgggaaattggcattgcgattcccaatggctgggggacagagtcatcaccaccagcacccgaacctgggccctgcccacctacaacaatcacctctacaagcaaatctccaacagcacatctggaggatcttcaaatgacaacgcctacttcggctacagcaccccctgggggtattttgacttcaacagattccactgccacttctcaccacgtgactggcagcgactcatcaacaacaactggggattccggcctaagcgactcaacttcaagctcttcaacattcaggtcaaagaggttacggacaacaatggagtcaagaccatcgccaataaccttaccagcacggtccaggtcttcacggactcagactatcagctcccgtacgtgctcgggtcggctcacgagggctgcctcccgccgttcccagcggacgttttcatgattcctcagtacgggtatctgacgcttaatgatggaagccaggccgtgggtcgttcgtccttttactgcctggaatatttcccgtcgcaaatgctaagaacgggtaacaacttccagttcagctacgagtttgagaacgtacctttccatagcagctacgctcacagccaaagcctggaccgactaatgaatccactcatcgaccaatacttgtactatctctcaaagactattaacggttctggacagaatcaacaaacgctaaaattcagtgtggccggacccagcaacatggctgtccagggaagaaactacatacctggacccagctaccgacaacaacgtgtctcaaccactgtgactcaaaacaacaacagcgaatttgcttggcctggagcttcttcttgggctctcaatggacgtaatagcttgatgaatcctggacctgctatggccagccacaaagaaggagaggaccgtttctttcctttgtctggatctttaatttttggcaaacaaggaactggaagagacaacgtggatgcggacaaagtcatgataaccaacgaagaagaaattaaaactactaacccggtagcaacggagtcctatggacaagtggccacaaaccaccagagtgcccaagcacaggcgcagaccggctgggttcaaaaccaaggaatacttccgggtatggtttggcaggacagagatgtgtacctgcaaggacccatttgggccaaaattcctcacacggacggcaactttcacccttctccgctgatgggagggtttggaatgaagcacccgcctcctcagatcctcatcaaaaacacacctgtacctgcggatcctccaacggccttcaacaaggacaagctgaactctttcatcacccagtattctactggccaagtcagcgtggagatcgagtgggagctgcagaaggaaaacagcaagcgctggaacccggagatccagtacacttccaactattacaagcctaataatgttgaatttgctgttaatactgaaggtgtatatagtgaaccccgccccattggcaccagatacctgactcgtaatctg

SEQ ID NO: 655 - DNA, 2208 bp, synthetic construct
  misc_feature 1..2208: note = Description of Artificial Sequence: Synthetic polynucleotide
  source 1..2208: mol_type = other DNA
atggctgccgatggttatcttccagattggctcgaggacaaccttagtgaaggaattcgcgagtggtgggctttgaaacctggagcccctcaacccaaggcaaatcaacaacatcaagacaacgctcgaggtcttgtgcttccgggttacaaataccttggacccggcaacggactcgacaagggggagccggtcaacgcagcagacgcggcggccctcgagcacaacaaggcctacgaccagcagctcaaggccggagacaacccgtacctcaagtgcaaccacgccgacgccgagttccaggagcggctcaaagaagatacgtcttttgggggcaacctcgggcgagcagtcttccaggccaaaaagaggcctcttgaacctcttggtctggttgaggaagcggctaagacggctcctggaaagaagaggcctgtagagcagtctcctcaggaaccggactcctccgcgggtattggcaaatcgggtgcacagcccgctaaaaagagactcaatttcggtcagactggcgacacagagtcagtcccagaccctcaaccaatcggagaacctcccgcagccccctcaggtgtgagatctcttacaatggcttcaggtggtggcgcaccagtggcagacaataacgaaggtgccgatggagtgggtagttcctcgggaaattggcattgcgattcccaatggctgggggacagagtcatcaccaccagcacccgaacctgggccctgcccacctacaacaatcacctctacaagcaaatctccaacagcacatctggaggatcttcaaatgacaacgcctacctcggctacagcaccccctgggggtattttgacttcaacagattccactgccacttctcaccacgtgactggcagcgactcatcaacaacaactggggattccggcctaagcgactcaacttcaagctcttcaacattcaggtcaaagaggttacggacaacaatggagtcaagaccatcgccaataaccttaccagcacggtccaggtcttcacggactcagactatcagctcccgtacgtgctcgggtcggctcacgagggctgcctcccgccgttcccagcggacgttttcatgattcctcagtacgggtatctgacgcttaatgatggaagccaggccgtgggtcgttcgtccttttactgcctggaatatttcccgtcgcaaatgctaagaacgggtaacaacttccagttcagctacgagtttgagaacgtacctttccatagcagctacgctcacagccaaagcctggaccgactaatgaatccactcatcgaccaatacttgtactatctctcaaagactattaacggttctggacagaatcaacaaacgctaaaattcagtgtggccggacccagcaacatggctgtccagggaagaaactacatacctggacccagctaccgacaacaacgtgtctcaaccactgtgactcaaaacaacaacagcgaatttgcttggcctggagcttcttcttgggctctcaatggacgtaatagcttgatgaatcctggacctactatggccagccacaaagaaggagaggaccgtttctttcctttgtctggatctttaatttttggcaaacaaggaactggaagagacaacgtggatgcggacaaagtcatgataaccaacgaagaagaaattaaaactactaacccggtagcaacggagtcctatggacaagtggccacaaaccaccagagtgcccaagcacaggcgcagaccggctgggttcaaaaccaaggaatacttccgggtatggtttggcaggacagagatgtgtacctgcaaggacccatttgggccaaaattcctcacacggacggcaactttcacccttctccgctgatgggagggtttggaatgaagcacccgcctcctcagatcctcatcaaaaacacacctgtacctgcggatcctccaacggccttcaacaaggacaagctgaactctttcatcacccagtattctactggccaagtcagcgtggagatcgagtgggagctgcagaaggaaaacagcaagcgctggaacccggagatccagtacacttccaactattacaagtctaataatgttgaatttgctgttaatactgaaggtgtatatagtgaaccccgccccattggcaccagatacctgactcgtaatctg

SEQ ID NO: 656 - DNA, 2208 bp, synthetic construct
  misc_feature 1..2208: note = Description of Artificial Sequence: Synthetic polynucleotide
  source 1..2208: mol_type = other DNA
atggctgccgatggttatcttccagattggctcgaggacaaccttagtgaaggaattcgcgagtggtgggctttgaaacctggagcccctcaacccaaggcaaatcaacaacatcaagacaacgctcgaggtcttgtgcttccgggttacaaataccttggacccggcaacggactcgacaagggggagccggtcaacgcagcagacgcggcggccctcgtgcacgacaaggcctacgaccagcagctcaaggccggagacaacccgtacctcaagtgcaaccacgccgacgccgagttccaggagcggctcaaagaagatacgtcttttgggggcaacctcgggcgagcagtcttccaggccaaaaagaggcttcttgaacctcttggtctggttgaggaagcggctaagacggctcctggaaagaagaggcctgtagagcagtctcctcaggaaccggactcctccgcgggtattggcaaatcgggtgcacagcccgctaaaaagagactcaatttcggtcagactggcgacacagagtcagtcccagaccctcaaccaatcggagaacctcccgcagccccctcaggtgtgggatctcttacaatggcttcaggtggtggcgcaccagtggcagacaataacgaaggtgccgatggagtgggtagttcctcgggaaattggcattgcgattcccaatggctgggggacagagtcatcaccaccagcacccgaacctgggccctgcccacctacaacaatcacctctacaagcaaatctccaacagcacatctggaggatcttcaaatgacaacgcctacctcggctacagcaccccctgggggtattttgacttcaacagattccactgccacttctcaccacgtgactggcagcgactcatcaacaacaactggggattccggcctaagcgactcaacttcaagctcttcaacattcaggtcaaagaggttacggacaacaatggagtcaagaccatcgccaataaccttaccagcacggtccaggtcttcacggactcagactatcagctcccgtacgtgctcgggtcggctcacgagggctgcctcccgccgttcccagcggacgttttcacgattcctcagtacgggtatctgacgcttaatgatggaagccaggccgtgggtcgttcgtccttttactgcctggaatatttcccgtcgcaaatgctaagaacgggtaacaacttccagttcagctacgagtttgagaacgtacctttccatagcagctacgctcacagccaaagcctggaccgactaatgaatccactcatcgaccaatacttgtactatctctcaaagactattaacggttctggacagaatcaacaaacgctaaaattcagtgtggccggacccagcaacatggctgtccagggaagaaactacatacctggacccagctaccgacaacaacgtgtctcaaccactgtgactcaaaacaacaacagcgaatttgcttggcctggagcttcttcttgggctctcaatggacgtaatagcttgatgaatcctggacctgctatggccagccacaaagaaggagaggaccgtttctttcctttgtctggatctttaatttttggcaaacaaggaactggaagagacaacgtggatgcggacaaagtcatgataaccaacgaagaagaaattaaaactactaacccggtagcaacggagtcctatggacaagtggccacaaaccaccagagtgcccaagcacaggcgcagaccggctgggttcaaaaccaaggaatacttccgggtatggtttggcaggacagagatgtgtacctgcaaggacccatttgggccaaaattcctcacacggacggcaactttcacccttctccgctgatgggagggtttggaatgaagcacccgcctcctcagatcctcatcaaaaacacacctgtacctgcggatcctccaacggccttcaacaaggacaagctgaactctttcatcacccagtattctactggccaagtcagcgtggagatcgagtgggagctgcagaaggaaaacagcaagcgctggaacccggagatccagtacacttccaactattacaagtctaataatgttgaatttgctgttaatactgaaggtgtatatagtgaaccccgccccattgggccccgatacctgactcgtaatttt

SEQ ID NO: 657 - DNA, 2208 bp, synthetic construct
  misc_feature 1..2208: note = Description of Artificial Sequence: Synthetic polynucleotide
  source 1..2208: mol_type = other DNA
atggctgccgatggttatcttccagattggctcgaggacaaccttagtgaaggaattcgcgagtggtgggctttgaaacctggagcccctcaacccaaggcaaatcaacaacatcaagacaacgctcgaggtcttgtgcttccgggttacaaataccttggacccggcaacggactcgacaagggggagccggtcaacgcagcagacgcggcggccctcgagcacaacaaggcctacgaccagcagctcaaggccggagacaacccgtacctcaagtgcaaccacgccgacgccgagttccaggagcggctcaaagaagatacgtcttttgggggcaacctcgggcgagcagtcttccaggccaaaaagaggcttcttgaacctcttggtctggttgaggaagcggctaagacggctcctggaaagaagaggcctgtagagcagtctcctcaggaaccggactcctccgcgggtattggcaaatcgggtgcacagcccgctaaaaagagactcaatttcggtcagactggcgacacagagtcagtcccagaccctcaaccaatcggagaacctcccgcagccccctcaggtgtgagatctcttacaatggcttcaggtggtggcgcaccagtggcagacaataacgaaggtgccgatggagtgggtagttcctcgggaaattggcattgcgattcccaatggctgggggacagagtcatcaccaccagcacccgaacctgggccctgcccacctacaacaatcacctctacaagcaaatctccaacagcacatctggaggatcttcaaatgacaacgcctacctcggctacagcaccccctgggggtattttgacttcaacagattccactgccacttctcaccacgtgactggcagcgactcatcaacaacaactggggattccggcctaagcgactcaacttcaagctcttcaacattcaggtcaaagaggttacggacaacaatggagtcaagaccatcgccaataaccttaccagcacggtccaggtcttcacggactcagactatcagctcccgtacgtgctcgggtcggctcacgagggctgcctcccgccgttcccagcggacgttttcatgattcctcagtacgggtatctgacgcttaatgatggaagccaggccgtgggtcgttcgtccttttactgcctggaatatttcccgtcgcaaatgctaagaacgggtaacaacttccagttcagctacgagtttgagaacgtacctttccatagcagctacgctcacagccaaagcctggaccgactaatgaatccactcatcgaccaatacttgtactatctctcaaagactattaacggttctggacagaatcaacaaacgctaaaattcagtgtggccggacccagcaacatggctgtccagggaagaaactacatacctggacccagctaccgacaacaacgtgtctcaaccactgtgactcaaaacaacaacagcgaatttgcttggcctggagcttcttcttgggctctcaatggacgtaatagcttgatgaatcctggacctgctatggccagccacaaagaaggagaggaccgtttctttcctttgtctggatctttaatttttggcaaacaaggaactggaagagacaacgtggatgcggacaaagtcatgataaccaacgaagaagaaattaaaactactaacccggtagcaacggagtcctatggacaagtggccacaaaccaccagagtgcccaagcacaggcgcagaccggctgggttcaaaaccaaggaatacttccgggtatggtttggcaggacagagatgtgtacctgcaaggacccatttgggccaaaattcctcacacggacggcaactttcacccttctccgctgatgggagggtttggaatgaagcacccgcctcctcagatcctcatcaaaaacacacctgtacctgcggatcctccaacggccttcaacaaggacaagctgaactctttcatcacccagtattctactggccaagtcagcgtggagatcgagtgggagctgcagaaggaaaacagcaagcgctggaacccggagatccagtacacttccaactattacaagtctaataatgttgaatttgctgttaatactgaaggtgtatatagtgaaccccgccccattggcaccagatacctgactcgtaatctg

SEQ ID NO: 658 - DNA, 2208 bp, synthetic construct
  misc_feature 1..2208: note = Description of Artificial Sequence: Synthetic polynucleotide
  source 1..2208: mol_type = other DNA
atggctgccgatggttatcttccagattggctcgaggacaaccttagtgaaggaattcgcgagtggtgggctttgaaacctggagcccctcaacccaaggcaaatcaacaacatcaagacaacgctcgaggtcttgtgcttccgggttacaaataccttggacccggcaacggactcgacaagggggagccggtcaacgcagcagacgcggcggccctcgagcacgacaaggcctacgaccagcagctcaaggccggagacaacccgtacctcaagtgcaaccacgccgacgccgagttccaggagcggctcaaagaagatacgtcttttgggggcaacctcgggcgagcagtcttccaggccaaaaagaggcttcttgaacctcttggtctggttgaggaagcggctaagacggctcctggaaagaagaggcctgtagagcagtctcctcaggaaccggactcctccgcgggtattggcaaatcgggtgcacagcccgctaaaaagagactcaatttcggtcagactggcgacacagagtcagtcccagaccctcaaccaatcggagaacctcccgcagccccctcaggtgtgggatctcttacaatggcttcaggcggtggcgcaccagtggcagacaataacgaaggtgccgatggagtgggtagttcctcgggaaattggcattgcgattcccaatggctgggggacagagtcatcaccaccagcacccgaacctgggccctgcccacctacaacaatcacctctacaagcaaatctccaacagcacatctggaggatcttcaaatgacaacgcctacctcggctacagcaccccctgggggtattttgacttcaacagattccactgccacttctcaccacgtgactggcagcgactcatcaacaacaactggggattccggcctaagcgactcaacttcgagctcttcaacattcaggtcaaagaggttacggacaacaatggagtcaagaccatcgccaataaccttaccagcacggtccaggtcttcacggactcagactatcagctcccgtacgtgctcgggtcggctcacgagggctgcctcccgccgttcccagcggacgttttcatgattcctcagtacgggtatctgacgcttaatgatggaagccaggccgtgggtcgttcgtccttttactgcctggaatatttcccgtcgcaaatgctaagaacgggtaacaacttccagtccagctacgagtttgagaacgtacctttccatagcagctacgctcacagccaaagcctggaccgactaatgaatccactcatcgaccaatacttgtactatctctcaaagactattaacggttctggacagaatcaacaaacgctaaaattcagtgtggccggacccagcaacatggctgtccagggaagaaactacatacctggacccagctaccgacaacaacgtgcctcaaccactgtgactcaaaacaacaacagcgaatttgcttggcctggagcttcttcttgggctctcaatggacgtaatagcttgatgaatcctggacctgctatggccagccacaaagaaggggaggaccgtttctttcctttgtctggatctttaatttttggcaaacaaggaactggaagagacaacgtggatgcggacaaagtcatgataaccaacgaagaagaaattaaaactactaacccggtagcaacggagtcctatggacaagtggccacaaaccaccagagtgcccaagcacaggcgcagaccggctgggttcaaaaccaaggaatacttccgggtatggtttggcaggacagagatgtgtacctgcaaggacccatttgggccaaaattcctcacacggacggcaactttcacccttctccgctgatgggagggtttggaatgaagcacccgcctcctcagatcctcatcaaaaacacacctgtacctgcggatcctccaacggccttcaacaaggacaagctgaactctttcatcacccagtattctactggccaagtcagcgtggagatcgagtgggagctgcagaaggaaaacagcaagcgctggaacccggagatccagtacacttccaactattacaagtctaataatgttgaatttgctgttaatactgaaggtgtatatagtgaaccccgccccattggcaccagatacctgactcgtaatctg

SEQ ID NO: 659 - DNA, 2208 bp, synthetic construct
  misc_feature 1..2208: note = Description of Artificial Sequence: Synthetic polynucleotide
  source 1..2208: mol_type = other DNA
atggctgccgatggttatcttccagattggctcgaggacaaccttagtgaaggaattcgcgagtggtgggctttgaaacctggagcccctcaacccaaggcaaatcaacaacatcaagacaacgctcgaggtcttgtgcttccgggttacaaataccttggacccggcaacggactcgacaagggggagccggtcaacgcagcagacgcggcggccctcgagcacgacaaggcctacgaccagcagctcaaggccggagacaacccgtacctcaagtgcaaccacgccgacgccgagttccaggagcggctcaaagaagatacgtcttttgggggcaacctcgggcgagcagtcttccaggccaaaaagaggcttcttgaacctcttggtctggttgaggaagcggctaagacggctcctggaaagaagaggcctgtagagcagtctcctcaggaaccggactcctccgcgggtattggcaaatcgggtgcacagcccgctaaaaagagactcaatttcggtcagactggcgacacagagtcagtcccagaccctcaaccaatcggagaacctcccgcagcccccccaggtgtgggatctcttacaatggcttcaggtggtggcgcaccagtggcggacaataacgaaggtgccgatggagtgggtagttcctcgggaaattggcattgcgattcccaatggctgggggacagagtcatcaccaccagcacccgaacctgggccctgcccacctacaacaatcacctctacaagcaaatctccaacagcacatctggaggatcttcaaatgacaacgcctacctcggctacagcaccccctgggggtattttgacttcaacagattccactgccacttctcaccacgtgactggcagcgactcatcaacaacaactggggattccggcctaagcgactcaacttcaagctcttcaacattcaggtcaaagaggttacggacaacaatggagtcaagaccatcgccaataaccttaccagcacggtccaggtcttcacggactcagactatcagctcccgtacgtgctcgggtcggctcacgagggctgcctcccgccgttcccagcggacgttttcatgattcctcagtacgggtatctgacgcttaatgatggaagccaggccgtgggtcgttcgtccttttactgcctggaatatttcccgtcgcaaatgctaagaacgggtaacaacttccagttcagctacgagtttgagaacgtacctttccatagcagctacgctcacagccaaagcctggaccgactaatgaatccactcatcgaccaatacttgtactatctctcaaagactattagcggttctggacagaatcaacaaacgctaaaattcagtgtggccggacccagcaacatggctgtccagggaagaaactacatacctggacccagctaccgacaacaacgtgtctcaaccactgtgactcaaaacaacagcagcgaatttgcttggcctggagcttcttcttgggctctcaatggacgtaatagcttgatgaatcctggacctgctatggccagccacaaagaaggagaggaccgtttctttcctttgtctggatctttaatttttggcaaacaaggaactggaagagacaacgtggatgcggacaaagtcatgataaccaacgaagaagaaattaaaactactaacccggtagcaacggagtcctatggacaagtggccacaaaccaccagagtgcccaagcacaggcgcagaccggctgggttcaaaaccaaggaatactttcgggtatggtttggcaggacagagatgtgtacctgcaaggacccatttgggccaaaattcctcacacggacggcaactttcacccttctccgctgatgggagggtttggaatgaagcacccgcctcctcagatcctcatcaaaaacacacctgtacctgcggatcctccaacggccttcaacaaggacaagctgaactctttcatcacccagtattctactggccaagtcagcgtggagatcgagtgggagctgcagaaggaaaacagcaagcgctggaacccggagatccagtacacttccaactattacaagtctaataatgttgaatttgctgttaatactgaaggtgtatatagtgaaccccgccccattggcaccagatacctgactcgtaatctg

SEQ ID NO: 660 - DNA, 2208 bp, synthetic construct
  misc_feature 1..2208: note = Description of Artificial Sequence: Synthetic polynucleotide
  source 1..2208: mol_type = other DNA
atggctgccgatggttatcttccagattggctcgaggacaaccttagtgaaggaattcgcgagtggtgggctttgaaacctggagcccctcaacccaaggcaaatcaacaacatcaagacaacgctcgaggtcttgtgcttccgggttacaaataccttggacccggcaacggactcgacaagggggagccggtcaacgcagcagacgcggcggccctcgagcacgacaaggcctacgaccagcagctcaaggccggagacaacccgtacctcaagtgcaaccacgccgacgccgagttccaggagcggctcaaagaagatacgtcttttgggggcaacctcgggcgagcagtcttccaggccaaaaagaggcttcttgaacctcttggtctggttgaggaagcggctaagacggctcctggaaagaagaggcctgtagagcagtctcctcaggaaccggactcctccgcgggtattggcaaatcgggtgcacagcccgctaaaaagagactcaatttcggtcagactggcgacacagagtcagtcccagaccctcaaccaatcggagaacctcccgcagccccctcaggtgtgggatctcttacaatggcttcaggtggtggcgcaccagtggcagacaataacgaaggtgccgatggagtgggtagttcctcgggaaattggcattgcgattcccaatggctgggggacagagtcatcaccaccagcacccgaacctgggccctgcccacctacaacaatcacctctacaagcaaatctccaacagcacatctggaggatcttcaaatgacaacgcctacctcggctacagcaccccctgggggtattttgacttcaacagattccactgccacttctcaccacgtgactggcagcgactcatcaacaacaactggggattccggcctaagcgactcaacttcaagctcttcaacattcaggtcaaagaggttacggacaacaatggagtcaagaccatcgccaataaccttaccagcacggtccaggtcttcacggactcagactatcagctcccgtacgtgctcgggtcggctcacgagggctgcctcccgccgttcccagcggacgttttcatgattcctcagtacgggtatctgacgcttaatgatggaagccaggccgtgggtcgttcgtccttttactgcctggaatatttcccgtcgcaaatgctaagaacgggtaacaacttccagttcagctacgagtttgagaacgtacctttccatagcagctacgctcacagccaaagcctggaccgactaatgaatccactcatcgaccaatacttgtactatctctcaaagactattaacggttctggacagaatcaacaaacgctaaaattcagtgtggccggacccagcaacatggctgtccagggaagaaactacatacctggacccagctaccgacaacaacgtgtctcaaccactgtgactcaaaacaacaacagcgaatttgcttggcctggagcttcttcttgggctctcaatggacgtaatagcttgatgaatcctggacctgctatggccagccacaaagaaggagaggaccgtttctttcctttgtctggatctttaatttttggcaaacaaggaactggaagagacaacgtggatgcggacaaagtcatgataaccaacgaagaagaaattaaaactactaacccggtagcaacggagtcctatggacaagtggccacaaaccaccagagtgcccaagcacaggcgcagaccggctgggttcaaaaccaaggaatacttccgggtatggtttggcaggacagagatgtgtacctgcaaggacccatttgggccaaaattcctcacacggacggcaactttcacccttctccgctgatgggagggtttggaatgaagcacccgcctcctcagatcctcatcaaaaacacacctgtacctgcggatcctccaacggccttcaacaaggacaagctgaactctttcatcacccagtattctactggccaagtcagcgtggagatcgagtgggagctgcagaaggaaaacagcaagcgctggaacccggagatccagtacacttccaactattacaagtctaataatgttgaatttgctgttaatactgaaggtgtatatagtgaaccccgccccattggcaccagatacctgactcgtaatctg

SEQ ID NO: 661 - DNA, 2208 bp, synthetic construct; identical to SEQ ID NO: 660
  misc_feature 1..2208: note = Description of Artificial Sequence: Synthetic polynucleotide
  source 1..2208: mol_type = other DNA

SEQ ID NO: 662 - DNA, 2208 bp, synthetic construct
  misc_feature 1..2208: note = Description of Artificial Sequence: Synthetic polynucleotide
  source 1..2208: mol_type = other DNA
atggctgccgatggttatcttccagattggctcgaggacaaccttagtgaaggaattcgcgagtggtgggctttgaaacctggagcccctcaacccaaggcaaatcaacaacatcaagacaacgctcgaggtcttgtgcttccgggttacaaataccttggacccggcaacggactcgacaagggggagccggtcaacgcagcagacgcggcggccctcgagcacgacaaggcctacgaccagcagctcaaggccggagacaacccgtacctcaagtgcaaccacgccgacgccgagttccaggagcggctcaaagaagatacgtcttttgggggcaacctcgggcgagcagtcttccaggccaaaaagaggcttcttgaacctcttggtctggttgaggaagcggctaagacggctcctggaaagaagaggcctgtagagcagtctcctcaggaaccggactcctccgcgggtattggcaaatcgggtgcacagcccgctaaaaagagactcaatttcggtcagactggcgacacagagtcagtcccagaccctcaaccaatcggagaacctcccgcagccccctcaggtgtgggatctcttacaatggcttcaggtggtggcgcaccagtggcagacaataacgaaggtgccgatggagtgggtagttcctcgggaaattggcattgcgattcccaatggctgggggacagagtcatcaccaccagcacccgaacctgggccctgcccacctacaacaatcacctctacaagcaaatctccaacagcacatctggaggatcttcaaatgacaacgcctacctcgactacagcaccccctgggggtattttgacttcaacagattccactgccacttctcaccacgtgactggcagcggctcatcaacaacaactggggattccggcctaagcgactcaacttcaagctcttcaacattcaggtcaaagaggttacggacaacaatggagtcaagaccatcgccaataaccttaccagcacggtccaggtcttcacggactcagactatcagctcccgtacgtgctcgggtcggctcacgagggctgcctcccgccgttcccagcggacgttttcatgattcctcagtacgggtatctgacgcttaatgatggaagccaggccgtgggtcgttcgtccttttactgcctggaatatttcccgtcgcaaatgctaagaacgggtaacaacttccagttcagctacgagtttgagaacgtacctttccatagcagctacgctcacagccaaagcctggaccgactaatgaatccactcatcgaccaatacttgtactatctctcaaagactattaacggttctggacagaatcaacaaacgctaaaattcagtgtggccggacccagcaacatggctgtccagggaagaaactacatacctggacccagctaccgacaacaacgtgtctcaaccactgtgactcaaaacaacaacagcgaatttgcttggcctggagcttcttcttgggctctcaatggacgtaatagcttgatgaatcctggacctgctatggccagccacaaagaaggagaggaccgtttctttcctttgtctggatctttaatttttggcaaacaaggaactggaagagacaacgtggatgcggacaaagtcatgataaccaacgaagaagaaattaaaactactaacccggtagcaacggagtcctatggacaagtggccacaaaccaccagagtgcccaagcacaggcgcagaccggctgggttcaaaaccaaggaatacttccgggtatggtttggcagggcagagatgtgtacctgcaaggacccatttgggccaaaattcctcacacggacggcaactttcacccttctccgctgatgggagggtttggaatgaagcacccgcctcctcagatcctcatcaaaaacacacctgtacctgcggatcctccaacggccttcaacaaggacaagctgaactctttcatcacccagtattctactggccaagtcagcgtggagatcgagtgggagctgcagaaggaaaacagcaagcgctggaacccggagatccagtacacttccaactattacaagtctaataatgttgaatttgctgttaatactgaaggtgtatatagtgaaccccgccccattggcaccagatacctgactcgtaatctg

SEQ ID NO: 663 - DNA, 2208 bp, synthetic construct; identical to SEQ ID NO: 660
  misc_feature 1..2208: note = Description of Artificial Sequence: Synthetic polynucleotide
  source 1..2208: mol_type = other DNA

SEQ ID NO: 664 - DNA, 2208 bp, synthetic construct
  misc_feature 1..2208: note = Description of Artificial Sequence: Synthetic polynucleotide
  source 1..2208: mol_type = other DNA
atggctgccgatggttatcctccagattggctcgaggacaaccttagtgaaggaattcgcgagtggtgggctttgaaacctggagcccctcaacccaaggcaaatcaacaacatcaagacaacgctcgaggtcttgtgcttccgggttacaaataccttggacccggcaacggactcgacaagggggagccggtcaacgcagcagacgcggcggccctcgagcacgacaaggcctacgaccagcagctcaaggccggggacaacccgcacctcaagtacaaccacgccgacgccgagttccaggagcggctcaaagaagatacgtcttttgggggcaacctcgggcgagcagtcttccaggccaaaaagaggcttcttgaacctcttggtctggttgaggaagcggctaagacggctcctggaaagaagaggcccgtagagcagtctcctcaggaaccggactcctccgcgggtattggcaaatcgggtgcacagcccgctaagaagagactcaatttcggtcagactggcgacactgagtcagtcccagaccctcaaccaatcggagaacctcccgcagccccctcaggtgtgggatctcttacaatggcttcaggtggtggcgcaccagtggcagacaataacgaaggtgccgatggagtgggtagttcctcgggaaattggcattgcgattcccaatggctgggggacagagtcatcaccaccagcacccgaacctgggccctgcccacctacaacaatcacctctacaagcaaatctccaacagcacatctggaggatcttcaaatgacaacgcctacttcggctacagcaccccctgggggtattttgacttcaacagattccactgccacttctcaccacgtgactggcagcgactcatcaacaacaactggggattccggcctaagcgactcaacttcaagctcttcaacattcaggtcaaagaggttacggacaacaatggagtcaagaccatcgccaataaccttaccagcacggtccaggtcttcacggactcagactatcagctcccgtacgtgctcgggtcggctcacgagggctgcctcccgccgttcccagcggacgttttcatgattcctcagtacgggtatctgacgcttaatgatggaagccaggccgtgggtcgttcgtccttttactgcctggaatatttcccgtcgcaaatgctaagaacgggtaacaacttccagttcagctacgagtttgagaacgtacctttccatagcagctacgctcacagccaaagcctggaccgactaatgaatccactcatcgaccaatacttgtactatctctcaaagactattaacggttctggacagaatcaacaaacgctaaaattcagtgtggccggacccagcaacatggctgtccagggaagaaactacatacctggacccagctaccgacaacaacgtgtctcaaccactgtgactcaaaacaacaacagcgaatttgcttggcctggagcttcttcttgggctctcaatggacgtaatagcttgatgaatcctggacctgctatggccagccacaaagaaggagaggaccgtttctttcctttgtctggatctttaatttttggcaaacaaggaactggaagagacaacgtggatgcggacaaagtcatgataaccaacgaagaagaaattaaaactactaacccggtagcaacggagtcctatggacaagtggccacaaaccaccagagtgcccaagcacaggcgcagaccggctgggttcaaaaccaaggaatacttccgggtatggtttggcaggacagagatgtgtacctgcaaggacccatttgggccaaaattcctcacacggacggcaactttcacccttctccgctgatgggagggtttggagtgaagcacccgcctcctcagatcctcatcaaaaacacacctgtacctgcggatcctccaacggccttcaacaaggacaggctgaactctttcatcacccagtattctactggccaagtcagcgtggagatcgagtgggagctgcagaaggaaaacagcaagcgctggaacccggagatccagtacacttccaactattacaagtctaataatgttgaatttgctgttaatactgaaggtgtatatagtgaaccccgccccattggcaccagatacctgactcgtaatctg

SEQ ID NO: 665 - DNA, 2208 bp, synthetic construct
  misc_feature 1..2208: note = Description of Artificial Sequence: Synthetic polynucleotide
  source 1..2208: mol_type = other DNA
atggctgccgatggttatcttccagattggctcgaggacaaccttagtgaaggaattcgcgagtggtgggctttgaaacctggagcccctcaacccaaggcaaatcaacaacatcaagacaacgctcgaggtcttgtgcttccgggttacaaataccttggacccggcaacggactcgacaagggggagccggtcaacgcagcagacgcggcggccctcgagcacgacaaggcctacgaccagcagctcaaggccggagacaacccgtacctcaagtacaaccacgccgacgccgagttccaggagcggctcaaagaagatacgtcttttgggggcaacctcgggcgagcagtcttccaggccaaaaagaggcttcttgaacctcttggtctggttgaggaagcggctaagacggctcctggaaagaagaggcctgtagagcagtctcctcaggaaccggactcctccgcgggtattggcaaatcgggtgcacagcccgctaaaaagagactcaatttcggtcagactggcgacacagagtcagtcccagaccctcaaccaatcggagaacctcccgcagccccctcaggtgtgggatctcttacaatggcttcaggtggtggcgcaccagtggcggacaataacgaaggtgccgatggagtgggtagttcctcgggaaattggcattgcgattcccaatggctgggggacagagtcatcaccaccagcacccgaacctgggccctgcccacctacaacaatcacctctacaagcaaatctccaacagcacatctggaggatcttcaaatgacaacgcctacttcggctacagcaccccctgggggtattttgacttcaacagattccactgccacttctcaccacgtgactggcagcgactcatcaacaacaactggggattccggcctaagcgactcaacttcaagctcttcaacattcaggtcaaagaggttacggacaacaatggagtcaagaccatcgccaataaccttaccagcacggtccaggtcttcacggactcagactatcagctcccgtacgtgctcgggtcggctcacgagggctgcctcccgccgttcccagcggacgttttcatgattcctcagtacgggtatctgacgcttaatgatggaagccaggccgtgggtcgttcgtccttttactgcctggaatatttcccgtcgcaaatgctaagaacgggtaacaacttccagttcagctacgagtttgagaacgtacctttccatagcagctacgctcacagccaaagcctggaccgactaatgaatccactcatcgaccaatacttgtactatctctcaaagactattaacggttctggacagaatcaacaaacgctaaaattcagtgtggccggacccagcaacatggctgtccagggaagaaactacatacctggacccagctaccgacaacaacgtgtctcaaccactgtgactcaaaacaacaacagcgaatttgcttggcctggagcttcttcttgggctctcaatggacgtaatagtttgatgaatcctggacctgctatggccagccacaaagaaggagaggaccgtttctttcctttgtctggatctttaatttttggcaaacaaggaactggaagagacaacgtggatgcggacaaagtcatgataaccaacgaagaagaaattaaaactactaacccggtagcaacggagtcctatggacaagtggccacaaaccaccagagtgcccaagcacaggcgcagaccggctgggttcaaaaccaaggaatacttccgggtatggtttggcaggacagagatgtgtacctgcaaggacccatttgggccaaaattcctcacacggacggcaactttcacccttctccgctgatgggagggtttggagtgaagcacccgcctcctcagatcctcatcaaaaacacacctgtacctgcggatcctccaacggccttcaacaaggacaagctgaactctttcatcacccagtattctactggccaagtcagcgtggagatcgagtgggagctgcagaaggaaaacagcaagcgctggaacccggagatccagtacacttccaactattacaagtctaataatgttgaatttgctgttaatactgaaggtgtatatagtgaaccccgccccattggcaccagatacctgactcgtaatctg

SEQ ID NO: 666 - DNA, 2208 bp, synthetic construct
  misc_feature 1..2208: note = Description of Artificial Sequence: Synthetic polynucleotide
  source 1..2208: mol_type = other DNA
atggctgccgatggttatcttccagattggctcgaggacaaccttagtgaaggaattcgcgagtggtgggctttgaaacctggagcccctcaacccaaggcaaatcaacaacatcaagacaacgctcgaggtcttgtgcttccgggttacaaataccttggacccggcaacggactcgacaagggggagccggtcaacgcagcagacgcggcggccctcgagcacgacaaggcctacgaccagcagctcaaggccggagacaacccgtacctcaagtacaaccacgccgacgccgagttccaggagcggctcaaagaagatacgtcttttgggggcaacctcgggcgagcagtcttccaggccaaaaagaggcttcttgaacctcttggtctggttgaggaagcggctaagacggctcctggaaagaagaggcctgtagagcagtctcctcaggaaccggactcctccgcgggtattggcaaatcgggtgcacagcccgctaaaaagagactcaatttcggtcagactggcgacacagagtcagtcccagaccctcaaccaatcggagaacctcccgcagccccctcaggtgtgggatctcttacaatggcttcaggtggtggcgcaccagtggcagacaataacgaaggtgccgatggagtgggtagttcctcgggaaattggcattgcgattcccaatggctgggggacagagtcatcaccaccagcacccgaacctgggccctgcccacttacaacaatcacctctacaagcaaatctccaacagcacatctggaggatcttcaaatgacaacgcctacttcggctacagcaccccctgggggtattttgacttcaacagattccactgccacttctcaccacgtgactggcagcgactcaccaacaacaactggggattccggcctaagcgactcaacttcaagctcttcaacattcaggtcaaagaggttacggacaacaatggagtcaagaccatcgccaataaccttaccagcacggtccaggtcttcacggactcagactatcagctcccgtacgtgctcgggtcggctcacgagggctgcctcccgccgttcccagcggacgttttcatgattcctcagtacgggtatctgacgcttaatgatggaagccaggccgtgggtcgttcgtccttttactgcctggaatatatcccgtcgcaaatgctaagaacgggtaacaacttccagttcagctacgagtttgagaacgtacctttccatagcagctacgctcacagccaaagcctggaccgactaatgaatccactcatcgaccaatacttgtactatctctcaaagactattaacggttctggacagaatcaacaaacgctaaaattcagtgtggccggacccagcaacatggctgtccagggaagaaactacatacctggacccagctaccgacaacaacgtgtctcaaccactgtgactcaaaacaacaacagcgaatttgcttggcctggagcttcttcttgggctctcaatggacgtaatagcttgatgaatcctggacctgctatggccagccacaaagaaggagaggaccgtttctttcctttgtctggatctttaatttttggcaaacaaggaactggaagagacaacgtggatgcggacaaagtcatgataaccaacgaagaagaaattaaaactactaacccggtagcaacggagtcctatggacaagtggccacaaaccaccagagtgcccaagcacaggcgcagaccggctgggttcaaaaccaaggaatacttccgggtatggtttggcaggacagagatgtgtacctgcaaggacccatttgggccaaaattcctcacacggacggcaactttcacccttctccgctgatgggagggtttggagtgaagcacccgcctcctcagatcctcatcaaaaacacacctgtacctgcggatcctccaacggccttcaacaaggacaagctgaactctttcatcacccagtattctactggccaagtcagcgtggagatcgagtgggagctgcagaaggaaaacagcaagcgctggaacccggagatccagtacacttccaactattacaagtctaataatgttgaatttgctgttaatactgaaggtgtatatagtgaaccccgccccattggcaccagatacctgactcgtaatctg

SEQ ID NO: 667 - DNA, 2208 bp, synthetic construct
  misc_feature 1..2208: note = Description of Artificial Sequence: Synthetic polynucleotide
  source 1..2208: mol_type = other DNA
atggctgccgatggttatcttccagattggctcgaggacaaccttagtgaaggaattcgcgagtggtgggctttgaaacctggagcccctcaacccaaggcaaatcaacaacatcaagacaacgctcgaggtcttgtgcttccgggttacaaataccttggacccggcaacggactcgacaagggggagccggtcaacgcagcagacgcggcggccctcgagcacgacaaggcctacgaccagcagctcaaggccggagacaacccgtacctcaagtacaaccacgccgacgccgagttccaggagcggctcaaagaagatacgtcttttgggggcaacctcgggcgagcagtcttccaggccaaaaagaggcttcttgaacctcttggtctggttgaggaagcggctaagacggctcctggaaagaagaggcctgtagagcagtctcctcaggaaccggactcctccgcgggtattggcaaatcgggtgcacagcccgctaaaaagagactcaatttcggtcagactggcgacacagagtcagtcccagaccctcaaccaatcggagaacctcccgcagccccctcaggtgtgggatctcttacaatggcttcaggtggtggcgcaccagtggcagacaataacgaaggtgccgatggagtgggtagttcctcgggaaattggcattgcgattcccaatggctgggggacagagtcatcaccaccagcacccgaacctgggccctgcccacctacaacaatcacctctacaagcaaatctccaacagcacatctggaggatcttcaaatgacaacgcctacttcggctacagcaccccctgggggtattttgacttcaacagattccactgccacttctcaccacgtgactggcagcgactcatcaacaacaactggggattccggcctaagcgactcaacttcaagctcttcaacattcaggtcaaagaggttacggacaacaatggagtcaagaccatcgccaataaccttaccagcacggtccaggtcttcacggactcagactatcagctcccgtacgtgctcgggtcggctcacgagggctgcctcccgccgttcccagcggacgttttcatgattcctcagtacgggtatctgacgcttaatgatggaagccaggccgtgggtcgttcgtccttttactgcctggaatatttcccgtcgcaaatgctaagaacgggtaacaacttccagtttagctacgagtttgagaacgtacctttccatagcagctacgctcacagccaaagcctggaccgactaatgaatccactcatcgaccaatacttgtactatctctcaaagactattaacggttctggacagaatcaacaaacgctaaaattcagtgtggccggacccagcaacatggctgtccagggaagaaactacatacctggacccagctaccgacaacaacgtgtctcaaccactgtgactcaaaacaacaacagcgaatttgcttggcctggagcttcttcttgggctctcaatggacgtaatagcttgatgaatcctggacctgctatggccagccacaaagaaggagaggaccgtttctttcctttgtctggatctttaatttctggcaaacaaggaactggaagagacaacgtggatgcgaacaaagtcatgataaccaacgaagaagaaattaaaactactaacccggtagcaacggagtcctatggacaagtggccacaaaccaccagagtgcccaagcacaggcgcagaccggctgggttcaaaaccaaggaatacttccgggtatggtttggcaggacagagatgtgtacctgcaaggacccatttgggccaaaattcctcacacggacggcaactttcacccttctccgctgatgggagggtttgaaatgaagcacccgcctcctcagatcctcatcaaaaacacacctgtacctgcggatcctccaacggccttcaacaaggacaagctgaactctttcatcacccagtattctactggccaagtcagcgtggagatcgagtgggagctgcagaaggaaaacagcaagcgctggaacccggagatccagtacacttccaactattacaagtctaataatgttgaatttgctgttaatactgaaggtgtatatagtgaaccccgccccattggcaccagatacctgactcgtaatctg

SEQ ID NO: 668 - DNA, 2208 bp, synthetic construct
  misc_feature 1..2208: note = Description of Artificial Sequence: Synthetic polynucleotide
  source 1..2208: mol_type = other DNA
atggctgccgatggttatcttccagattggctcgaggacaaccttagtgaaggaattcgcgagtggtgggctttgaaacctggagcccctcaacccaaggcaaatcaacaacatcaagacaacgctcgaggtcttgtgcttccgggttacaaataccttggacccggcaacggactcgacaagggggagccggtcaacgcagcagacgcggcggccctcgagcacgacaaggcctacgaccagcagctcaaggccggagacaacccgtacctcaagtacaaccacgccgacgccgagttccaggagcggctcaaagaagatacgtcttttgggggcaacctcgggcgagcagtcttccaggccaaaaagaggcttcttgaacctcttggtctggttgaggaagcggctaagacggctcctggaaagaagaggcctgtagagcagtctcctcaggaaccggactcctccgcgggtattggcaaatcgggtgcacagcccgctaaaaagagactcaatttcggtcagactggcgacacagagtcagtcccagaccctcaaccaatcggagaacctcccgcagccccctcaggtgtgggatctcttacaatagcttcaggtggtggcgcaccagtggcagacaataacgaaggtgccgatggagtgggtagttcctcgggaaattggcattgcgattcccaatggctgggggacagagtcatcaccaccagcacccgaacctgggccctgcccacctacaacaatcacctctacaagcgaatctccaacagcacatctggaggatcttcaaatgacaacgcctacttcggctacagcaccccctgggggtattttgacttcaacagattccactgccacttctcaccacgtgactggcagcgactcatcaacaacaactggggattccggcctaagcgactcaacttcaagcttttcaacattcgggtcaaagaggttacggacaacaatggagtcaagaccatcaccaataaccttaccagcacggtccaggtcttcacggactcagactatcagctcccgtacgtgcttgggtcggctcacgagggctgcctcccgccgttcccagcggacgttttcatgattcctcagtacgggtatctgacgcttaatgatggaagccaggccgtgggtcgttcgtccttttactgcctggaatatttcccgtcgcaaatgctaagaacgggtaacaacttccagttcagctacgagtttgagaacgtacctttccatagcagctacgctcacagccaaagcctggaccgactaatgaatccactcatcgaccaatacttgtactatctctcaaagactattaacggttctggacagaatcaacaaacgctaaaattcagtgtggccggacccagcaacatggctgtccagggaagaaactacatacctggacccagctaccgacaacaacgtgtctcaaccactgtgactcgaaacaacaacagcgaatttgcttggcctggagcttcttcttgggctctcaatggacgtaatagcttgatgaatcctggacctgctatggccagccacaaagaaggagaggaccgtttctttcctttgtctggatctttaatttttggcaaacaaggaactggaagagacaacgtggatgcggacaaagtcatgataaccaacgaagaagaaattaaaactactaacccggtagcaacggagtcctatggacaagtggccacaaaccaccagagtgcccaagcacaggcgcagaccggctgggttcaaaaccaaggaatacttccgggtatggtttggcaggacagagatgtgtacctgcaaggacccatttgggccaaaattcctcacacggacggcaactttcacccttctccgctgatgggagggtttggagtgaagcacccgcctcctcagatcctcatcaaaaacacacctgtacctgcggatcctccaacggccttcaacaaggacaagctgaactctttcatcacccagtattctactggccaagtcagcgtggagatcgagtgggagctgcagaaggaaaacagcaagcgctggaacccggagatccagtacacttccaactattacaagtctaataatgttgaatttgctgttaatactgaaggtgtatatagtgaaccccgccccattggcaccagatacctgactcgtaatctg

SEQ ID NO: 669 - DNA, 2208 bp, synthetic construct
  misc_feature 1..2208: note = Description of Artificial Sequence: Synthetic polynucleotide
  source 1..2208: mol_type = other DNA
atggctgccgatggttatcttccagattggctcgaggacaaccttagtgaaggaattcgcgagtggtgggctttgaaacctggagcccctcaacccaaggcaaatcaacaacatcaagacaacgctcgaggtcttgtgcttccgggttacaaataccttggacccggcaacggactcgacaagggggagccggtcaacgcagcagacgcggcggccctcgagcacgacaaggcctacgaccagcagctcaaggccggagacaacccgtacctcaagtacaaccacgccgacgccgagttccaggagcggctcaaagaagatacgtcttttgggggcaacctcgggcgagcagtcttccaggccaaaaagaggcttcttgaacctcttggtctggttgaggaagcggctaagacggctcctggaaagaagaggcctgtagagcagtctcctcaggaaccggactcctccgcgggtattggcaaatcgggcgcacagcccgctaaaaagagactcaatttcggtcagactggcgacacagagccagtcccagaccctcaaccaatcggagaacctcccgcagccccctcaggtgtgggatctcttacaatggcttcaggtggtggcgcaccagtggcagacaataacgaaggtgccgatggagtgggtagttcctcgggaaattggcattgcgattcccaatggctgggggacagagtcatcaccaccagcacccgaacctgggccctgcccacctacaacaatcacctctacaagcaaatctccaacagcacatctggaggatcttcaaatgacaacgcctacttcggctacagcaccccctgggggtattttgacttcaacagattccactgccacttctcaccacgtgactggcagcgactcatcaacaacaactggggattccggcctaagcgactcaacttcaagctcttcaacattcaggtcaaagaggttacggacaacaatggagtcaagaccatcgccaataaccttaccagcacggtccaggtcttcacggactcagactatcagctcccgtacgtgctcgggtcggctcacgagggctgcctcccgccgttcccagcgggcgttttcatgattcctcagtacgggtatctgacgcttaatgatggaagccaggccgtgggtcgttcgtccttttactgcctggaatatttcccgtcgcaaatgctaagaacgggtaacaacttccagttcagctacgagtttgagaacgtacctttccatagcagctacgctcacagccaaagcctggaccgactaatgaatccactcatcgaccaatacttgtactatctctcaaagactattaacggttctggacagaatcaacaaacgctaaaattcagtgtggccggacccagcaacatggctgtccagggaagaaactacatacctggacccagctaccgacaacaacgtgtctcaaccactgcgactcaaaacaacaacagcgaatttgcttggcctggagcttcttcttgggctctcaatggacgtaatagcttgatgaatcctggacctgctatggccagccacaaagaaggagaggaccgtttctttcctttgtctggatctttaatttttggcaaacaaggaactggaagagacaacgtggatgcggacaaagtcatgataaccaacgaagaagaaattaaaactactaacccggtagcaacggagtcctatggacaagtggccacaaaccaccagagtgcccaagcacaggcgcagaccggctgggttcaaaaccaaggaatacttccgggtatggtttggcaggacagagatgtgtacctgcaaggacccatttgggccaaaattcctcacacggacggcaactttcacccttctccgctgatgggagggtttggaatgaagcacccgcctcctcagatcctcatcaaaaacacacctgtacctgcggatcctccaacggccttcaacaaggacaagctgaactctttcatcacccagtattctactggccaagtcagcgtggagatcgagtgggagctgcagaaggaaaacagcaagcgctggaacccggagatccagtacacttccaactattacaagtctaataatgttgaatttgctgttaatactgaaggtgtatatagtgaaccccgccccattggcaccagatacctgactcgtaatctg

SEQ ID NO: 670 - DNA, 2208 bp, synthetic construct
  misc_feature 1..2208: note = Description of Artificial Sequence: Synthetic polynucleotide
  source 1..2208: mol_type = other DNA
atggctgccgatggttatcttccagattggctcgaggacaaccttagtgaaggaattcgcgagtggtgggctttgaaacctggagcccctcaacccaaggcaaatcaacaacatcaagacaacgctcgaggtcttgtgcttccgggttacaaataccttggacccggcaacggactcgacaagggggagccggtcaacgcagcagacgcggcggccctcgagcacgacaaggcctacgaccagcagctcaaggccggagacaacccgtacctcaagtacaaccacgccgacgccgggttccaggagcggctcaaagaagatacgtcttttgggggcaacctcgggcgagcagtcttccaggccaaaaagaggcttcttgaacctcttggtctggttgaggaagcggctaagacggctcctggaaagaagaggcctgtagagcagtctcctcaggaaccggactcctccgcgggtattggcaaatcgggtgcacagcccgctaaaaagagactcaatttcggtcagactggcgacacagagtcagtcccagtccctcaaccaatcggagaacctcccgcagccccctcaggtgtgggatctcttacaatggcttcaggtggtggcgcaccagtggcagacaataacgaaggtgccgatggagtgggtagttcctcgggaaattggcattgcgattcccaatggctgggggacagagtcatcaccaccagcacccgaacctgggccctgcccacctacaacaatcacctctacaagcaaatctccaacagcacatctggaggatcttcaaatgacaacgcctacttcggctacagcaccccctgggggtattttgacttcaacagattccactgccacttctcaccacgtgactggcagcgactcatcaacaacaactggggattccggcctaagcgactcaacttcaagctcttcaacattcaggtcaaagaggttacggacaacaatggagtcaagaccatcgccaataaccttaccagcacggtccaggtcttcacggactcagactatcagctcccgtacgtgctcgggtcggctcacgagggctgcctcccgccgttcccagcggacgttttcatgattcctcagtacgggtatctgacgcttaatgatggaagccaggccgtgggtcgttcgtccttttactgcctggaatatttcccgtcgcaaatgctaagaacgggtaacaacttccagttcagctacgagtttgagaacgtacctttccatagcagctacgctcacagccaaagcctggaccgactaatgaatccactcatcgaccaatacttgtactatctctcaaagactattaacggttctggacagaatcaacaaacgctaaaattcagtgtggccggacccagcaacatggctgtccagggaagaaactacatacctggacccagctaccgacaacaacgtgtctcaaccactgtgactcaaaacaacaacagcgaatttgcttggcctggagcttcttcttgggctctcaatggacgtaatagcttgatgaatcctggacctgctatggccagccacaaagaaggagaggaccgtttctttcctttgtctggatctttaatttttggcaaacaaggagctggaagagacaacgtggatgcggacaaagtcatgataaccaacgaagaagaaattaaaactactaacccggtagcaacggagtcctatggacaagtggccacaaaccaccagagtgcccaagcacaggcgcagaccggctgggttcaaaaccaaggaatacttccgggtatggtttggcaggacagagatgtgtacctgcaaggacccatttgggccaaaattcctcacacggacggcaactttcacccttctccgctgatgggagggtttggaatgaagcacccgcctcctcagatcctcatcaaaaacacacctgtacctgcggatcctccaacggccttcaacaaggacaagctgaactctttcatcacccagtattctactggccaagtcagcgtggagatcgagtgggagctgcagaaggaaaacagcaagcgctggaacccggagatccagtacacttccaactattacaagtctaataatgttgaatttgctgttaatactgaaggtgtatatagtgaaccccgccccattggcaccagatacctgactcgtaatctg

SEQ ID NO: 671 - DNA, 2208 bp, synthetic construct
  misc_feature 1..2208: note = Description of Artificial Sequence: Synthetic polynucleotide
  misc_difference 377: note = modified_base - a, c, t, g, unknown or other
  source 1..2208: mol_type = other DNA
atggctgccgatggttatcttccagattggctcgaggacaaccttagtgaaggaattcgcgagaggtgggctttgaaacctggagcccctcaacccaaggcaaatcaacaacatcaagacaacgctcgaggtcttgtgcttccgggttacaaataccttggacccggcaacggactcgacaagggggagccggtcaacgcagcagacgcggcggccctcgagcacgacaaggcctacgaccagcagctcaaggccggagacaacccgtacctcaagtacaaccacgccgacgccgagttccaggagcggctcaaagaagatacgtcttttgggggcaacctcgggcgagcagtcttccaggccaaaaagaggcttcntgaacctcttggtctggttgaggaagcggctaagacggctcctggaaagaagaggcctgtagagcagtctcctcaggaaccggactcctccgcgggtattggcaaatcgggtgcacagcccgctaaaaagagactcaatttcggtcagactggcgacacagagtcagtcccagaccctcaaccaatcggagaacctcccgcagccccctcaggtgtgggatctcttacaatggcttcaggtggtggcgcaccagtggcagacaataacgaaggtgccgatggagtgggtagttcctcggggaattggcattgcgattcccaatggctgggggacagagtcatcaccaccagcacccgaacctgggccctgcccacctacaacaatcacctctacaagcaaatctccaacagcacatctggaggatcttcaaatgacaacgcctacttcggctacagcaccccctgggggtattttgacttcaacagattccactgccacttctcaccacgtgactggcagcgactcatcaacaacaactggggattccggcctaagcgactcaacttcaagctcttcaacattcaggtcaaagaggttacggacaacaatggagtcaagaccatcgccaataaccttaccagcacggtccaggtcttcacggactcagactatcagctcccgtacgtgctcgggtcggctcacgagggctgcctcccgccgttcccagcggacgttttcatgattcctcagtacgggtatctgacgcttaatgatggaagccaggccgtgggtcgttcgtccttttactgcctggaatatttcccgtcgcaaatgctaagaacgggtaacaacttccagttcagctacgagtttgagaacgtacctttccatagcagctacgctcacagccaaagcccggaccgactaatgaatccactcatcgaccaatacttgtactatctctcaaagactattaacggttctggacagaatcaacaaacgctaaaattcagtgtggccggacccagcaacatggctgtccagggaagaaactacatacctggacccagctaccgacaacaacgtgtctcaaccactgtgactcaaaacaacaacagcgaatttgcttggcctggagcttcttcttgggctctcaatggacgtaatagcttgatgaatcctggacctgctatggccagccacaaagaaggagaggaccgtttctttcctttgtctggatctttaatttttggcaaacaaggaactggaagagacaacgtggatgcggacaaagtcatgataaccaacgaagaagaaattaaaactactaacccggtagcaacggagtcctatggacaagtggccacaaaccaccagagtgcccaagcacaggcgcagaccggctgggttcaaaaccaaggaatacttccgggtatggtttggcaggacagagatgtgtacctgcaaggacccatttgggccaaaattcctcacacggacggcaactttcacccttctccgctgatgggagggtttggagtgaagcacccgcctcctcagatcctcatcaaaaacacacctgtacctgcggatcctccaacggccttcaacaaggacaagctgaactctttcatcacccagtattctactggccaagtcagcgtggagatcgagtgggagctgcagaaggaaaacagcaagcgctggaacccggagatccagtacacttccaactattacaagtctaataatgttgaatttgctgttaatactgaaggtgtatatagtgaaccccgccccattggcaccagatacctgactcgtaatctg

SEQ ID NO: 672 - DNA, 2208 bp, synthetic construct
  misc_feature 1..2208: note = Description of Artificial Sequence: Synthetic polynucleotide
  source 1..2208: mol_type = other DNA
atggctgccgatggttatcttccagattggctcgaggacaaccttagtgaaggaattcgcgagtggtgggctttgaaacctggagcccctcaacccaaggcaaatcaacaacatcaagacaacgctcgaggtcttgtgcttccgggttacaaataccttggacccggcaacggactcgacaagggggagccggtcaacgcagcagacgcggcggccctcgagcacgacaaggcctacgaccagcagctcaaggccggagacaacccgtacctcaagtacaaccacgccgacgccgagttccaggagcggctcaaagaagatacgtcttttgggggcaacctcgggcgagcagtcttccaggccaaaaagaggcttcttgaacctcttggtctggttgaggaagcggctaagacggctcctggaaagaagaggcctgtagagcagtctcctcaggaaccggactcctccgcgggtattggcaaatcgggtgcacagcccgctaaaaagagactcaatttcggtcagactggcgacacagagtcagtcccagaccctcaaccaatcggagaacctcccgcagccccctcaggtgtgggatctcttacaatggcttcaggtggtggcgcaccagtggcagacaataacgaaggtgccgatggagtgggtagttcctcgggaaattggcattgcgattcccaatggctgggggacagagtcatcaccaccagcacccgaacctgggccctgcccacctacaacaatcacctctacaagcaaatctccaacagcacatctggaggatcttcaaatgacaacgcctacctcggctacagcaccccctgggggtattttgacttcaacagattccactgccacttctcaccacgtgactggcagcgactcatcaacaacaactggggattccggcctaagcgactcaacttcaagctcttcaacattcaggtcaaagaggttacggacaacaatggagtcaagaccatcgccaataaccttaccagcacggtccaggtcttcacggactcagactatcagctcccgtacgtgctcgggtcggctcacgagggctgcctcccgccgttcccagcggacgttttcatgattcctcagtacgggtatctgacgcttaatgatggaagccaggccgtgggtcgttcgtccttttactgcctggaatatttcccgtcgcaaatgctaagaacgggtaacaacttccagttcagctacgagtttgagaacgtacctttccatagcagctacgctcacagccaaagcctggaccgactaatgaatccactcatcgaccaatacttgtactatctctcaaagactattaacggttctggacagaatcaacaaacgctaaaattcagtgtggccggacccagcaacatggctgtccagggaagaaactacatacctggacccagctaccgacaacaacgtgtctcaaccactgtgactcaaaacaacaacagcgaatttgcttggcctggagcttcttcttgggctctcaatggacgtaatagcttgatgaatcctggacctgctatggccagccacaaagaaggagaggaccgtttctttcctttgtctggatctttaatttttggcaaacaaggaactggaagagacaacgtggatgcggacaaagtcatgataaccaacgaagaagaaattaaaactactaacccggtagcaacggagtcctatggacaagtggccacaaaccaccagagtgcccaagcacaggcgcagaccggctgggttcaaaaccaaggaatacttccgggtatggtttggcaggacagagatgtgtacctgcaaggacccatttgggccaaaattcctcacacggacggcaactttcacccttctccgctgatgggagggtttggaatgaagcacccgcctcctcagatcctcatcaaaaacacacctgtacctgcggatcctccaacggccttcaacaaggacaagctgaactctttcatcacccagtattctactggccaagtcagcgtggagatcgagtgggagctgcagaaggaaaacagcaagcgctggaacccggagatccagtacacttccaactattacaagtctaataatgttgaatttgctgttaatactgaaggtgtatatagtgaaccccgccccattggcaccagatacctgactcgtaatctg

SEQ ID NO: 673 - DNA, 2208 bp, synthetic construct
  misc_feature 1..2208: note = Description of Artificial Sequence: Synthetic polynucleotide
  source 1..2208: mol_type = other DNA
atggctgccgatggttatcttccagattggctcgaggacaaccttagtgaaggaattcgcgagtggtgggctttgaaacctggagcccctcaacccaaggcaaatcaacaacatcaagacaacgctcgaggtcttgtgcttccgggttacaaataccttggacccggcaacggactcgacaagggggagccggtcaacgcagcagacgcggcggccctcgagcacgacaaggcctacgaccagcagctcaaggccggagacaacccgtacctcaagtacaaccacgccgacgccgagttccaggagcggctcaaagaagatacgtcttttgggggcaacctcgggcgagcagtcttccaggccaaaaagaggcttcttgaacctcttggtctggttgaggaagcggctaagacggctcctggaaagaagaggcctgtagagcagtctcctcaggaaccggactcctccgcgggtattggcaaatcgggtgcacagcccgctaaaaagagactcaatttcggtcagactggcgacacagagtcagtcccagaccctcaaccaatcggagaacctcccgcagccccctcaggtgtgggatctcttacaatggcttcaggtggtggcgcaccagtggcagacaataacgaaggtgccgatggagtgggtagttcctcgggaaattggcattgcgattcccaatggctgggggacagagtcatcaccaccagcacccgaacctgggccctgcccacctacaacaatcacctctacaagcaaatctccaacagcacatctggaggatcttcaaatgacaacgcctacttcggctacagcaccccctgggggtattttgacttcaacagattccactgccacttctcaccacgtgactggcagcgactcatcaacaacaactggggattccggcctaagcgactcaacttcaagctcttcaacattcaggtcaaagaggttacggacaacaatggagtcaagaccatcgccaataaccttaccagcacggtccaggtcttcacggactcagactatcagctcccgtacgtgctcgggtcggctcacgagggctgcctcccgccgttcccagcggacgttttcatgattcctcagtacgggtatctgacgcttaatgatggaagccaggccgtgggtcgttcgtccttttactgcctggaatatttcccgtcgcaaatgctaagaacgggtaacaacttccagttcagctacgagtttgagaacgtacctttccatagcagctacgctcacagccagagcctggaccgactaatgaatccactcatcgaccaatacttgtactatctctcaaagactattaacggttctggacagaatcaacaaacgctaaaattcagtgtggccggacccagcaacatggctgtccagggaagaaactacatacctggacccagctaccgacaacaacgtgtctcaaccactgtgactcaaaacaacaacagcgaatttgcttggcctggagcttcttcttgggctctcaatggacgtaatagcttgatgaatcctggacctgctatggccagccacaaagaaggagaggaccgtttctttcctttgtctggatctttaatttttggcaaacaaggaactggaagagacaacgtggatgcggacaaagtcatgataaccaacgaagaagaaattaaaactactaacccggtagcaacggagtcctatggacaagtggccacaaaccaccagagtgcccaagcacaggcgcagaccggctgggttcaaaaccaaggaatacttccgggtatggtttggcaggacagagatgtgtacctgcaaggacccatttgggccaaaattcctcacacggacggcaactttcacccttctccgctgatgggagggtttggaatgaagcacccgcctcctcagatcctcatcaaaaacacacctgtacctgcggatcctccaacggccttcaacaaggacaagctggactctttcatcacccagtattctactggccaagtcagcgtggagatcgagtgggagctgcagaaggaaaacagcaagcgctggaacccggtgatccagtacacttccaactattacaagtctaataatgttgaatttgctgttaatactgaaggtgtatatagtgaaccccgccccattggcaccagatacctgactcgtaatctg

SEQ ID NO: 674 - DNA, 2208 bp, synthetic construct
  misc_feature 1..2208: note = Description of Artificial Sequence: Synthetic polynucleotide
  source 1..2208: mol_type = other DNA
atggctgccgatggttatcttccagattggctcgaggacaacctctctgagggcattcgcgagtggtgggacttgaaacctggagccccgaagcccaaagccaaccagcaaaagcaggacgacggccggggtctggtgcttcctggctacaagtacctcggacccttcaacggactcgacaagggggagcccgtcaacgcggcggacgcagcggccctcgagcacgacaaggcctacgaccagcagctcaaagcgggtgacaatccgtacctgcggtataaccacgccgacgccgagtttcaggagcgtctgcaagaagatacgtcttttgggggcaacctcgggcgagcagtcttccaggccaagaagcgggttctcgaacctctcggtctggttgaggaaggcgctaagacggctcctggaaagaaacgtccggtagagcagtcgccacaagagccagactcctcctcgggcatcggcaagacaggccagcagcccgctaaaaagagactcaattttggtcagactggcgactcagagtcagtccccgatccacaacctctcggagaacctccagcaacccccgctgctgtggggcctactacaatggcttcaggcggtggcgcaccaatggcagacaataacgaaggcgtcgacggagtgggtaatgcctcaggaaattggcattgcgattccacatggctgggcgacagagtcatcaccaccagcacccgcacctgggccttgcccacctacaataaccacctctacaagcaaatctccagtgcttcaacgggggccagcaacgacaaccactacttcggctacagcaccccctgggggtattttgatttcaacagattccactgccacttttcaccacgtgactggcagcgactcatcaacaacaattggggattccggcccaagagactcaacttcaaactcttcaacatccaagtcaaggaggtcacgacgaatgatggcgttacaaccatcgctaataaccttaccagcacggttcaagtcttctcggactcggagtaccagcttccgtacgtcctcggctctgcgcaccagggctgcctccctccgttcccggcggacgtgttcatgattccgcaatacggctacctgacgctcaacaatggcagccaagccgtgggacgttcatccttttactgcctggaatatttcccttctcagatgctgagaacgggcaacaactttaccttcagctacacctttgaggaagtgcctttccacagcagctacgcgcacagccagagcctggaccggctgatgaatcctctcatcgaccaatacctgtattacctgaacagaactcaaaatcagtccggaagtgcccaaaacaaggacttgctgtttagccgtgggtctccagctggcatgtctgttcagcccaaaaactggctacctggaccctgttatcggcagcagcgcgtttctaaaacaaaaacagacaacaacaacagcaattttacctggactggtgcttcaaaatataacctcaatgggcgtgaatccatcatcaaccctggcactgctatggcctcacacaaagacgacgaagacaagttctttcccatgagcggtgtcatgatttttggaaaagagagcgccggagcttcaaacactgcattggacaatgtcatgattacagacgaagaggaaattaaagccactaaccctgtggccaccgaaagatttgggaccgtggcagtcaatttccagagcagcagcacagaccctgcgaccggagatgtgcatgctatgggagcattacctggcatggtgtggcaagatagagacgtgtacctgcagggtcccatttgggccaaaattcctcacacagatggacactttcacccgtctcctcttatgggcggctttggactcaagaacccgcctcctcagatcctcatcaaaaacacgcctgttcctgcgaatcctccggcggagttttcagccacaaagcttgcttcattcatcacccaatactccacaggacaagtgagtgtggaaattgaatgggagctgcagaaagaaaacagcaagcgctggaatcccgaagtgcagtacacatccaattatgcaaaatctgccaacgttgattttactgtggacaacaatggactttatactgagcctcgccccattggcacccgttaccttacccgtcccctg

SEQ ID NO: 675 - DNA, 2208 bp, synthetic construct
  misc_feature 1..2208: note = Description of Artificial Sequence: Synthetic polynucleotide
  source 1..2208: mol_type = other DNA
atggctgccgatggttatcttccagattggctcgaggacaacctctctgagggcattcgcgagtggtgggacttgaaacctggagccccgaagcccaaagccaaccagcaaaagcaggacgacggccggggtctggtgcttcctggctacaagtacctcggacccttcaacggactcgacaagggggagcccgtcaacgcggcggacgcagcggccctcgagcacgacaaggcctacgaccagcagctcaaagcgggtgacaatccgtacctgcggtataaccacgccgacgccgagtttcaggagcgtctgcaagaagatacgtcttttgggggcaacctcgggcgagcagtcttccaggccaagaagcgggttctcgaacctctcggtctggttgaggaaggcgctaagacggctcctggaaagagacgtccggtagagcagtcgccacaagagccagactcctcctcgggcatcggcaagacaggccagcagcccgctaaaaagagactcaattttggtcagactggcgactcagagtcagtccccgatccacaacctctcggagaacctccagcaacccccgctgctgtgggacctactacaatggcttcaggcggtggcgcaccaatggcagacaataacgaaggcgccgacggagtgggtaatgcctcaggaaattggcattgcgattccacatggctgggcgacagagtcatcaccaccagcacccgcacctgggccttgcccacctacaataaccacctctacaagcaaatctccagtgcttcaacgggggccagcaacgacaaccactacttcggctacagcaccccctgggggtattttgatttcaacagattccactgccacttttcaccacgtgactggcagcgactcatcaacaacaattggggattccggcccaagagactcaacttcaaactcttcaacatccaagtcaaggaggtcacgacgaatgatggcgtcacaaccatcgctaataaccttaccagcacggttcaagtcttctcggactcggagtaccagcttccgtacgtcctcggctctgcgcaccagggctgcctccctccgttcccggcggacgtgttcatgattccgcaatacggctacctgacgctcaacaatggcagccaagccgtgggacgttcatccttttactgcctggaatatttcccttctcagatgctgagaacgggcaacaactttaccttcagctacacctttgaggaagtgcctttccacagcagctacgcgcacagccagagcctggaccggctgatgaatcctctcatcgaccaatacctgtattacctgaacagaactcaaaatcagtccggaagtgcccaaaacaaggacttgctgtttagccgtgggtctccagctggcatgtctgttcagcccaaaaactggctacctggaccctgttatcggcagcagcgcgtttctaaaacaaaaacagacaacaacaacagcaattttacctggactggtgcttcaaaatataacctcaatgggcgtgaatccatcatcaaccctggcactgctatggcctcacacaaagacgacgaagacaagttctttcccatgagcggtgtcatgatttttggaaaagagagcgccggagcttcaaacactgcattggacaatgtcatgattacagacgaagaggaaattaaagccactaaccctgtggccaccgaaagatttgggaccgtggcagtcaatttccagagcagcagcacagaccctgcgaccggagatgtgcatgctatgggagcattacctggcatggtgtggcaagatagagacgtgtacctgcagggtcccatttgggccaaaattcctcacacagatggacactttcacccgtctcctcttatgggcggctttggactcaagaacccgcctcctcagatcctcatcaaaaacacgcctgttcctgcgaatcctccggcggagttttcagctacaaagtttgcttcgttcatcacccaatactccacaggacaagtgagtgtggaaattgaatgggagctgcagaaagaaaacagcaagcgctggaatcccgaagtgcagtacacatccaattatgcaaaatctgccaacgttgattttactgtggacaacaatggactttatactgagcctcgccccattggcacccgttaccttacccgtcccctg

SEQ ID NO: 676 - DNA, 2208 bp, synthetic construct
  misc_feature 1..2208: note = Description of Artificial Sequence: Synthetic polynucleotide
  source 1..2208: mol_type = other DNA
atggctgccgatggttatcttccagattggctcgaggacaacctctctgagggcattcgcgagtggtgggacttgaaacctggagccccgaagcccaaagccaaccagcaaaagcaggacgacggccggggtctggtgcttcctggctacaagtacctcggacccttcaacggactcgacaagggggagcccgtcaacgcggcggacgcagcggccctcgagcacgacaaggcctacgaccagcagctcaaagcgggtgacaatccgtacccgcggtataaccacgccgacgccgagtttcaggagcgtctgcaagaagatacgtcttttgggggcaacctcgggcgagcagtcttccaggccaagaagcgggttctcgaacctctcggtctggttggggaaggcgctaagacggctcctggaaagaaacgtccggtagagcagtcgccacaagagccagactcctcctcgggcatcggcaagacaggccagcagcccgctaaaaagagactcaattttggtcagactggcgactcagagtcagtccccgatccacaacctctcggagaacctccagcaacccccgctgctgtgggacctactacaatggcttcaggcggtggcgcaccaatggcagacaataacgaaggcgccgacggagtgggtaatgcctcaggaaattggcattgcgattccacatggctgggcgacagagtcatcaccaccagcacccgcacctgggccttgcccacctacaataaccacctctacaagcaaatctccagtgcttcaacgggggccagcaacgacaaccactacttcggctacagcaccccctgggggtattttgatttcaacagattccactgccacttttcaccacgtgactggcagcgactcatcaacaacaattggggattccggcccaagagactcaacttcaaactcttcaacatccaagtcaaggaggtcacgacgaatgatggcgtcacaaccatcgctaataaccttaccagcacggttcaagtcttctcggactcggagtaccagcttccgtacgtcctcggctctgcgcaccagggctgcctccctccgttcccggcggacgtgttcatgattccgcaatacggctacctgacgctcaacaatggcagccaagccgtgggacgttcatccttttactgcctggaatatttcccttctcagatgctgagaacgggcaacaactttaccttcagctacacctttgaggaagtgcctttccacagcagctacgcgcacagccagagcctggaccggctgatgaatcctcccatcgaccaatacctgtattacctgaacagaactcaaaatcagtccggaagtgcccaaaacaaggacttgctgtttagccgtgggtctccagctggcatgtctgttcagcccaaaaactggctacctggaccctgttatcggcagcagcgcgtttctaaaacaaaaacagacaacaacaacagcaattttacctggactggtgcttcaaaatataacctcaatgggcgtgaatccatcatcaaccctggcactgctatggcctcacacaaagacgacgaagacaagttctttcccatgagcggtgtcatgatttttggaaaagagagcgccggagcttcaaacactgcattggacaatgtcatgattacagacgaagaggaaattaaagccactaaccctgtggccaccgaaagatttgggaccgtggcagtcaatttccagagcagcagcacagaccctgcgaccggagatgtgcatgctatgggagcattacctggcatggtgtggcaagatagagacgtgtacctgcagggtcccatttgggccaaaattcctcacacagatggacactttcacccgtctcctcttatgggcggctttggactcaagaacccgcctcctcagatcctcatcaaaaacacgcctgttcctgcgaatcctccggcggagttttcagctacaaagtttgcttcattcatcacccaatactccacaggacaagtgagtgtggaaattgaatgggagctgcagaaagaaaacagcaagcgctggaatcccgaagtgcagtacacatccaattatgcaaaatctgccaacgttgattttactgtggacaacaatggactttatactgagcctcgccccattggcacccgttaccttacccgtcccctg

SEQ ID NO: 677 - DNA, 2208 bp, synthetic construct
  misc_feature 1..2208: note = Description of Artificial Sequence: Synthetic polynucleotide
  source 1..2208: mol_type = other DNA
atggctgccgatggttatcttccagattggctcgaggacaacctctctgagggcattcgcgagtggtgggacttgaaacctggagccccgaagcccaaagccaaccagcaaaagcaggacgacggccggggtctggtgcttcctggctacaagtacctcggacccttcaacggactcgacaagggggagcccgtcaacgcggcggacgcagcggccctcgagcacgacaaggcctacgaccagcagctcaaagcgggtgacaatccgtacctgcggtataaccacgccgacgccgagtttcaggagcgtctgcaagaagatacgtcttttgggggcaacctcgggcgagcagtcttccaggccaagaagcgggttctcgaacctctcggtctggttgaggaaggcgctaagacggctcctggaaagaaacgtccggtagagcagtcgccacaagagccagactcctcctcgggcatcggcaagacaggccagcagcccgctaaaaagagactcaattttggtcagactggcgactcagagtcagtccccgatccacgacctctcggagaacctccagcaacccccgctgctgtgggacctactacaatggcttcaggcggtggcgcaccaatggcagacaataacgaaggcgccgacggagtgggtaatgcctcaggaaattggcattgcgattccacatggctgggcgacagagtcatcaccaccagcacccgcacctgggccttgcccacctacaataaccacctctacaagcaaatctccagtgcttcaacgggggccagcaacgacaaccactacttcggctacagcaccccctgggggtattttgatttcaacagattccactgccacttttcaccacgcgactggcagcgactcatcaacaacaattggggattccggcccaagagactcaacttcaaactcttcaacatccaagtcaaggaggtcacgacgaatgatggcgtcacaaccatcgctaataaccttaccagcacggttcaagtcttctcggactcggagtaccagcttccgtacgtcctcggctctgcgcaccagggctgcctccctccgttcccggcggacgtgttcatgattccgcaatacggctacctgacgctcaacaatggcagccaagccgtgggacgttcatccttttactgcctggaatatttcccttctcagatgctgagaacgggcaacaactttaccttcagctacacctttgaggaagtgcctttccacagcagctacgcgcacagccagagcctggaccggctgatgaatcctctcatcgaccaatacctgtattacctgaacagaactcaaaatcagtccggaagtgcccaaaacaaggacttgctgtttagccgtgggcctccagctggcatgtctgttcagcccaaaaactggctacctggaccctgttatcggcagcagcgcgtttctaaaacaaaaacagacaacaacaacagcaattttacctggactggtgcttcaaaatataacctcaatgggcgtgaatccatcatcaaccctggcactgctatggcctcacacaaagacgacgaagacaagttctttcccatgagcggtgtcatgatttttggaaaagagagcgccggagcttcaaacactgcattggacaatgtcatgattacggacgaagaggaaattaaagccactaaccctgtggccaccgaaagatttgggaccgtggcagtcaatttccagagcagcagcacagaccctgcgaccggagatgtgcatgctatgggagcattacctggcatggtgtggcaagatagagacgtgtacctgcagggtcccatttgggccaaaattcctcacacagatggacactttcacccgtctcctcttatgggcggctttggactcaagaacccgcctcctcagatcctcatcaaaaacacgcctgttcctgcgaatcctccggcggagttttcagctacaaagtttgcttcattcatcacccaatactccacaggacaagtgagtgtggaaattgaatgggagctgcagaaagaaaacagcaagcgctggaatcccgaagtgcagtacacatccaattatgcaaaatctgccaacgttgattttactgtggacaacaatggactttatactgagcctcgccccattggcacccgttaccttacccgtcccctg

SEQ ID NO: 678 - DNA, 2208 bp, synthetic construct
  misc_feature 1..2208: note = Description of Artificial Sequence: Synthetic polynucleotide
  source 1..2208: mol_type = other DNA
atggctgccgatggttatcttccagattggctcgaggacaacctctctgagggcattcgcgagtggtgggacttgaaacctggagccccgaagcccaaagccaaccagcaaaagcaggacgacggccggggtctggtgcttcctggctacaagtacctcggacccttcaacggactcgacaagggggagcccgtcaacgcggcggacgcagcggccctcgagcacgacaaggcctacgaccagcagctcaaagcgggtgacaatccgtacctgcggtataaccacgccgacgccgagtttcaggagcgtctgcaagaagatacgtcttttgggggcaacctcgggcgagcagtcttccaggccaagaagcgggttctcgaacctctcggtctggttgaggaaggcgctaagacggctcctggaaagaaacgtccggtagagcagtcgccacaagagccagactcctcctcgggcatcggcaagacaggccagcagcccgctaaaaagagactcaattttggtcagactggcggctcagagtcagtccccgatccacaacctctcggagaacctccagcaacccccgctgctgtgggacctactacaatggcttcaggcggtggcgcaccaatggcagacaataacgaaggcgccgacggagtgggtaatgcctcaggaaattggcattgcgattccacatggctgggcgacagagtcatcaccaccagcacccgcacctgggccttgcccacctacaataaccacctctacaagcaaatctccagtgcttcaacgggggccagcaacgacaaccactacttcggctacagcaccccctgggggtattttgatttcaacagattccactgccacttttcaccacgtgactggcagcgactcatcaacaacaattggggattccggcccaagagactcaacttcaaactcttcaacatccaagtcaaggaggtcacgacgaatgatggcgtcacaaccatcgctaataaccttaccagcacggttcaagtcttctcggactcggagtaccagcttccgtacgtcctcggctctgcgcaccagggctgcctccctccgttcccggcggacgtgttcatgattccgcaatacggctacctgacgctcaacaatggcagccaagccgtgggacgttcatccttttactgcctggaatatttcccttctcagatgctgagaacgggcaacaactttaccttcagctacacctttgaggaagtgcctttccacagcagctacgcgcacagccagagcctggaccggctgatgaatcctcccatcgaccaatacctgtattacctgaacagaactcaaaatcagtccgggagtgcccaaaacaaggacttgctgtttagccgtgggtctccagctggcatgtctgttcagcccaaaaactggctacctggaccctgttatcggcagcagcgcgtttctaaaacaaaaacagacaacaacaacagcaattttacctggactggtgcttcaaaatataacctcaatgggcgtgaatccatcatcaaccctggcactgctatggcctcacacaaagacgacgaagacaagttctttcccatgagcggtgtcatgatttttggaaaagagagcgccggagcttcaaacactgcattggacaatgtcatgattacagacgaagaggaaattaaagccactaaccctgtggccaccgaaagatttgggaccgtggcagtcaatttccagagcagcagcacagaccctgcgaccggagatgtgcatgctatgggagcattacctggcatggtgtggcaagatagagacgtgtacctgcagggtcccatttgggccaaaattcctcacacagatggacactttcacccgtctcctcttatgggcggctttggactcaagaacccgcctcctcagatcctcatcaaaaacacgcctgttcctgcgaatcctccggcggagttttcagctacaaagtttgcttcattcatcacccaatactccacaggacaagtgagtgtggaaattgaatgggagctgcagaaagaaaacagcaagcgctggaatcccgaagtgcagtacacatccaattatgcaaaatctgccaacgttgactttactgtggacaacaatggactttatactgagcctcgccccattggcacccgttaccttacccgtcccctg

SEQ ID NO: 679 - DNA, 2208 bp, synthetic construct
  misc_feature 1..2208: note = Description of Artificial Sequence: Synthetic polynucleotide
  source 1..2208: mol_type = other DNA
atggctgccgatggttatcttccagattggctcgaggacaacctctctgagggcattcgcgagtggtgggacttgaaacctggagccccgaagcccaaagccaaccagcaaaagcaggacgacggccggggtctggtgcttcctggctacaagtacctcggacccttcaacggactcgacaagggggagcccgtcaacgcggcggacgcagcggccctcgagcacgacaaggcctacgaccagcagctcaaagcgggtgacaatccgtacctgcggtataaccacgccgacgccgagtttcaagagcgtctgcaagaagatacgtcttttgggggcaacctcgggcgagcagtcttccaggccaagaagcgggttctcgaacctctcggtctggttgaggaaggcgctaagacggctcctggaaagaaacgtccggtagagcagtcgccacaagagccagactcctcctcgggcatcggcaagacaggccagcagcccgctaaaaagagactcaattttggtcagactggcgactcagagtcagtccccgatccgcaacctctcggagaacctccagcaacccccgctgctgtgggacctactacaatggcttcaggcggtggcgcaccaatggcagacaataacgaaggcgccgacggagtgggtaatgcctcaggaaattggcattgcgattccacatggctgggcgacagagtcatcaccaccagcacccgcacctgggccttgcccacctacaataaccacctctacaagcaaatctccagtgcttcaacgggggccagcaacgacaaccactacttcggctacagcaccccctgggggtattttgatttcaacagattccactgccacttttcaccacgtgactggcagcgactcatcaacaacaattggggattccggcccaagagactcaacttcaaactcttcaacatccaagtcaaggaggtcacgacgaatgatggcgtcacaaccatcgctaataaccttaccagcacggttcaagtcttctcggactcggagtaccagcttccgtacgtcctcggctctgcgcaccagggctgcctccctccgttcccggcggacgtgttcatgattccgcaatacggctacctgacgctcaacaatggcagccaagccgtgggacgttcatccttttactgcctggaatatttcccttctcagatgctgagaacgggcaacaactttaccttcagctacacctttgaggaagtgcctttccacagcagctacgcgcacagccagagcctggaccggctgatgaatcctctcatcgaccaatacctgtattacctgaacagaactcaaaatcagtccggaagtgcccaaaacaaggacttgctgtttagccgtgggtctccagctggcatgtctgttcagcccaaaaactggctacctggaccctgttatcggcagcagcgcgtttctaaaacaaaaacagacaacaacaacagcaattttacctggactggtgcttcaaaatataacctcaatgggcgtgaatccatcatcaaccctggcactgctgtggcctcacacaaagacgacgaagacaagttctttcccatgagcggtgtcatgatttttggaaaagagagcgccggagcttcaaacactgcattggacaatgtcatgattacagacgaagaggaaattaaagccactaaccctgtggccaccgaaagatttgggaccgtggcagtcaatttccagagcagcagcacagaccctgcgaccggagatgtgcatgctatgggagcattacctggcatggtgtggcaagatagagacgtgtacctgcagggtcccatttgggccaaaattcctcacacagatggacactttcacccgtctcctcttatgggcggctttggactcaagaacccgcctcctcagatcctcatcaaaaacacgcctgttcctgcgaatcctccggcggagttttcagctacaaagtttgcttcattcatcacccaatactccacaggacaagtgagtgtggaaattgaatgggagctgcagaaagaaaacagcaagcgctggaatcccgaagtgcagtacacatccaattatgcaaaatctgccaacgttgattttactgtggacaacaatggactttatactgagcctcgccccattggcacccgttaccttacccgtcccctg

SEQ ID NO: 680 - DNA, 2208 bp, synthetic construct
  misc_feature 1..2208: note = Description of Artificial Sequence: Synthetic polynucleotide
  source 1..2208: mol_type = other DNA
atggctgccgatggttatcttccagattggctcgaggacaacctctctgagggcattcgcgagtggtgggacttgaaacctggagccccgaagcccaaagccaaccagcaaaagcaggacgacggccggggtctggtgcttcctggctacaagtacctcggacccttcaacggactcgacaagggggagcccgtcaacgcggcggacgcagcggccctcgagcacgacaaggcctacgaccagcagctcaaagcgggtgacaatccgtacctgcggtataaccacgccgacgccgagtttcaggagcgtctgcaagaagatacgtcttttgggggcaacctcgggcgagcagtcttccaggccaagaagcgggttctcgaacctctcggtctggttgaggaaggcgctaagacggctcctggaaagaaacgtccggtagagcagtcgccacaagagccagactcctcctcgggcatcggcaagacaggccagcagcccgctaaaaagagactcaattttggtcagactggcgactcagagtcagtccccgatccacaacctctcggagaacctccagcaacccccgctgctgtgggacctactacaatggcttcaggcggtggcgcaccaatggcagacaataacgaaggcgccgacggagtgggtaatgcctcaggaaattggcattgcgattccacatggctgggcgacagagtcatcaccaccagcacccgcacctgggccttgcccacctacaataaccacctctacaagcaaatctccagtgcttcaacgggggccagcaacgacaaccactacttcggctacagcaccccctgggggtattttgatttcaacagattccactgccacttttcaccacgtgactggcagcaactcatcaacaacaattggggattccggcccaagagactcaacttcaaactcttcaacatccaagtcaaggaggtcacgacgaatgatggcgtcacaaccatcgctaataaccttaccagcacggttcaagtcttctcggactcggagtaccagcttccgtacgtcctcggctctgcgcaccagggctgcctccctccgttcccggcggacgtgttcatgattccgcaatacggctacctgacgctcaacaatggcagccaagccgtgggacgttcatccttttactgcctggaatatttcccttctcagatgctgagaacgggcaacaactttaccttcagctacacctttgaggaagtgcctttccacagcagctacgcgcacagccagagcctggaccggctgatgaatcctctcatcgaccaatacctgtattacctgaacagaactcaaaatcagtccggaagtgcccaaaacaaggacttgctgtttagccgtgggtctccagctggcatgtctgttcagcccaaaaactggctacctggaccctgttatcggcagcagcgcgtttctaaaacaaaaacagacaacaacaacagcaattttacctggactggtgcttcaaaatataacctcaatgggcgtgaatccatcatcaaccctggcactgctatggcctcacacaaagacgacgaagacaagttctttcccatgagcggtgtcatgatttttggaaaagagagcgccggagcttcaaacactgcattggacaatgtcatgattacagacgaagaggaaattaaagccactaaccctgtggccaccgaaagatttgggaccgtggcagtcaatttccagagcaccagcacagaccctgcgaccggagatgtgcatgctatgggagcattacctggcatggtgtggcaagatagagacgtgtacctgcagggtcccatttgggccaaaattcctcacacagatggacactttcacccgtctcctcttatgggcggctttggactcaagaacccgcctcctcagatcctcatcaaaaacacgcctgttcctgcgaatcctccggcggagttttcagctacaaagtttgcttcattcatcacccaatactccacaggacaagtgagtgtggaaattgaatgggagctgcagaaagaaaacagcaagcgctggaatcccgaagtgcagtacacatccaattatgcaaaatctgccgacgttgattttactgtggacaacaatggactttatactgagcctcgccccattggcacccgttaccttacccgtcccctg

SEQ ID NO: 681 - DNA, 2208 bp, synthetic construct
  misc_feature 1..2208: note = Description of Artificial Sequence: Synthetic polynucleotide
  source 1..2208: mol_type = other DNA
atggctgccgatggttatcttccagattggctcgaggacaacctctctgagggcattcgcgagtggtgggacttgaaacctggagccccgaagcccaaagccaaccagcaaaagcaggacgacggccggggtctggtgcttcctggctacaagtacctcggacccttcaacggactcgacaagggggagcccgtcaacgcggcggacgcagcggccctcgagcacgacaaggcctacgaccagcagctcaaagcgggtgacaatccgtacctgcggtataaccacgccgacgccgagtttcaagagcgtctgcaagaagatacgtcttttgggggcaacctcgggcgagcagtcttccaggccaagaagcgggttctcgaacctctcggtctggttgaggaaggcgctaagacggctcctggaaagaaacgtccggtagagcagtcgccacaagagccagactcctcctcgggcatcggcaagacaggccagcagcccgctaaaaagagactcaattttggtcagactggcgactcagagtcagtccccgatccgcaacctctcggagaacctccagcaacccccgctgctgtgggacctactacaatggcttcaggcggtggcgcaccaatggcagacaataacgaaggcgccgacggagtgggtaatgcctcaggaaattggcattgcgattccacatggctgggcgacagagtcatcaccaccagcacccgcacctgggccttgcccacctacaataaccacctctacaagcaaatctccagtgcttcaacgggggccagcaacgacaaccactacttcggctacagcaccccctgggggtattttgatttcaacagattccactgccacttttcaccacgtgactggcagcgactcatcaacaacaattggggattccggcccaagagactcaacttcaaactcttcaacatccaagtcaaggaggtcacgacgaatgatggcgtcacaaccatcgctaataaccttaccagcacggttcaagtcttctcggactcggagtaccagcctccgtacgtcctcggctctgcgcaccagggctgcctccctccgttcccggcggacgtgttcatgattccgcaatacggccacctgacgctcaacaatggcagccaagccgtgggacgttcatccttttactgcctggaatatttcccttctcagatgctgagaacgggcaacaactttaccttcagctacacctttgaggaagtgcctttccacagcagctacgcgcacagccagagcctggaccggctgacgaatcctctcatcgaccaatacctgtattacctgaacagaactcaaaatcagtccggaagtgcccaaaacaaggacttgctgtttagccgtgggtctccagctggcatgtctgttcagcccaaaaactggctacctggaccctgttatcggcagcagcgcgtttctaaaacaaaaacagacaacaacaacagcaattttacctggactggtgcttcaaaatataacctcaatgggcgtgaatccatcatcaaccctggcactgctatggcctcacacaaagacgacgaagacaagttctttcccatgagcggtgtcatgatttttggaaaagagagcgccggagcttcaaacactgcattggacaatgtcatgattacagacgaagaggaaattaaagccactaaccctgtggccaccgaaagatttgggaccgtggcagtcaatttccagagcagcagcacagaccctgcgaccggagatgtgcatgctatgggagcattacctggcatggtgtggcaagatagagacgtgtacctgcagggtcccatttgggccaaaattcctcacacagatggacactttcacccgtctcctcttatgggcggctttggactcaagaacccgcctcctcagatcctcatcaaaaacacgcctgttcctgcgaatcctccggcggagttttcagctacaaagtttgcttcattcatcacccaatactccacaggacaagtgagtgtggaaattgaatgggagctgcagaaagaaaacagcaagcgctggaatcccgaagtgcagtacacatccaattatgcaaaatctgccaacgttgattttactgtggacaacaatggactttatactgagcctcgccccattggcacccgttaccttacccgtcccctg

SEQ ID NO: 682 - DNA, 2208 bp, synthetic construct
  misc_feature 1..2208: note = Description of Artificial Sequence: Synthetic polynucleotide
  source 1..2208: mol_type = other DNA
atggctgccgatggttatcttccagattggctcgaggacaacctctctgagggcattcgcgagtggtgggacttgaaacctggagccccgaagcccaaagccaaccagcaagagcaggacgacggccggggtctggtgcttcctggctacaagtacctcggacccttcaacggactcgacaagggggagcccgtcaacgcggcggacgcagcggccctcgagcacgacaaggcctacgaccagcagctcaaagcgggtgacaatccgtacctgcggtataaccacgccgacgccgagtttcaggagcgtctgcaagaagatacgtcttttgggggcaacctcgggcgagcagtcttccaggccaagaagcgggttctcgaacctctcggtctggttgaggaaggcgctaagacggctcctggaaagaaacgtccggtagagcagtcgccacaagagccagactcctcctcgggcatcggcaagacaggccagcagcccgctaaaaagagactcaattttggtcagactggcgactcagagtcagtccccgatccacaacctctcggagaacctccagcaacccccgctgctgtgggacctactacaatggcttcaggcggtggcgcaccaatggcagacaataacgaaggcgccgacggagtgggtaatgcctcaggaaattggcattgcgattccacatggctgggcgacagagtcatcaccaccagcacccgcacctgggccttgcccacctacaataaccacctctacaagcaaatctccagtgcttcaacgggggccagcaacgacaaccactacttcggctacagcaccccctgggggtattttgatttcaacagattccactgccacttttcaccacgtgactggcagcgactcatcaacaacaattggggattccggcccaagagactcaacttcaaactcttcaacatccaagtcaaggaggtcacgacgaatgatggcgtcacaaccatcgctaataaccttaccagcacggttcaagtcttctcggactcggagtaccagcttccgtacgtcctcggctctgcgcaccagggctgcctccctccgttcccggcggacgtgttcatgattccgcaatacggctacctgacgctcaacaatggcagccaagccgtgggacgttcatccttttactgcctggaatatttcccttctcagatgctgagaacgggcaacaactttaccttcagctacacctttgaggaagtgcctttccacagcagctacgcgcacagccagagcctggaccggctgatgaatcctctcatcgaccaatacctgtattacctgaacagaactcaaaatcagtccggaagtgcccaaaacaaggacttgctgtttagccgtgggtctccagctggcatgtctgttcagcccaaaaactggctacctggaccctgttatcggcagcagcgcgtttctaaaacaaaaacagacaacaacaacagcaattttacctggactggtgcttcaaaatataacctcaatgggcgtgaatccatcatcaaccctggcactgctatggcctcacacaaagacgacgaagacaagttctttcccatgagcggtgtcatgatttttggaaaagagagcgccggagcttcaaacactgcattggacaatgtcatgattacagacgaagaggaaattaaagccactaaccctgtggccaccgaaagatttgggaccgtggcagtcaatttccagagcagcagcacagaccctgcgaccggagatgtgcatgctacgggaacattacctggcatggtgtggcaagatagagacgtgtacctgcagggtcccatttgggccaaaattcctcacacagatggacactttcacccgtctcctcttatgggcggctttggactcaagaacccgcctcctcagatcctcatcaaaaccacgcctgttcctgcgaatcctccggcggagttttcagctacaaagtttgcttcattcatcacccagtactccacaggacaagtgagtgtggaaattgaatgggagctgcagaaagaaaacagcaagcgctggaatcccgaagtgcagtacacatccaattatgcaaaatctgccaacgttgattttactgtggacgacaatggactttatactgagcctcgccccattggcacccgttaccttacccgtcccctg

SEQ ID NO: 683 - DNA, 2208 bp, synthetic construct
  misc_feature 1..2208: note = Description of Artificial Sequence: Synthetic polynucleotide
  source 1..2208: mol_type = other DNA
atggctgccgatggttatcttccagattggctcgaggacaacctctctgagggcattcgcgagtggtgggacttgaaacctggagccccgaagcccaaagccaaccagcaaaagcaggacgacggccggggtctggtgcttcctggctacaagtacctcggacccttcaacggactcgacaagggggagcccgtcaacgcggcggacgcagcggccctcgagcacgacaaggcctacgaccagcagctcaaagcgggtgacaatccgtacctgcggtataaccacgccgacgccgagtttcaggagcgtctgcaagaagatacgtcttttgggggcaacctcgggcgagcagtcttccaggccaagaagcgggttctcgaacctctcggtctggttgaggaaggcgctaagacggctcctggaaagaaacgtccggtagagcagtcgctacaagagccagactcctcctcgggcatcggcaagacaggccagcagcccgctaaaaagagactcaattttggtcagactggcgactcagagtcagtccccgatccacaacctctcggagaacctccagcaacccccgctgctgtgggacctactacaatggcttcaggcggtggcgcaccaatggcagacaataacgaaggcgccgacggagtgggtaatgcctcaggaaattggcattgcgattccacatggctgggcgacagagtcatcaccaccagcacccgcacctgggccttgcccacctacaataaccacctctacaagcaaatctccagtgcttcaacgggggccagcaacgacaaccactacttcggctacagcaccccctgggggtattttgatttcaacagattccactgccacttttcaccacgtgactggcagcgactcatcaacaacaattggggattccggcccaagagactcaacttcaaactcttcaacatccaagtcaaggaggtcacgacgaatgatggcgtcacaaccatcgctaataaccttaccagcacggttcaagtcttctcggactcggagtaccagcttccgtacgtcctcggctctgcgcaccagggctgcctccctccgttcccggcggacgtgttcatgattccgcaatacggctacctgacgctcaacaatggcagccaagccgtgggacgttcatccttttactgcctggaatatttcccttctcagatgctgagaacgggcaacaactttaccttcagctacacctttgaggaagtgcctttccacagcagctacgcgcacagccagagcctggaccggctgatgaatcctctcatcgaccaatacctgtattacctgaacagaactcaaaatcagtccggaagtgcccaaaacaaggacttgctgtttagccgtgggtctccagctggcatgtctgttcagcccaaaaactggctacctggaccctgttatcggcagcagcgcgtttctaaaacaaaaacagacaacgacaacagcaattttacctggactggtgcttcaaaatataacctcaatgggcgtgaatccatcatcaaccctggcactgctatggcctcacacaaagacgacgaagacaagttctttcccatgagcggtgtcatgatttttggaaaagagagcgccggagcttcaaacactgcattggacaatgtcatgattacagacgaagaggaaattaaagccactaaccctgtggccaccgaaagatttgggaccgtggcagtcaatttccagagcagcagcacagaccctgcgaccggagatgtgcatgctatgggagcattacctggcatggtgtggcaagatagagacgtgtacctgcagggtcccatttgggccaaaattcctcacacagatggacactttcacccgtctcctcttatgggcggctttggactcaagaacccgcctcctcagatcctcatcaaaaacacgcctgttcctgcgaatcctccggcggagttttcagctacaaagtttgcttcattcatcacccaatactccacaggacaagtgagtgtggaaattgaatgggagctgcagaaagaaaacagcaagcgctggaatcccgaagtgcagtacacatccaattatgcaaaatctgccaacgttgattttactgtggacaacaatggactttatactgagcctcgccccattggcacccgttaccttacccgtcccctg

SEQ ID NO: 684 - DNA, 2208 bp, synthetic construct
  misc_feature 1..2208: note = Description of Artificial Sequence: Synthetic polynucleotide
  source 1..2208: mol_type = other DNA
atggctgccgatggttatcttccagattggctcgaggacaacctctctgagggcattcgcgagtggtgggacttgaaacctggagctccgaagcccaaagccaaccagcaaaagcaggacgacggccggggtctggtgcttcctggctacaagtacctcggacccttcaacggactcgacaagggggagcccgtcaacgcggcggacgcagcggccctcgagcacgacaaggcctacgaccagcagctcaaagcgggtgacaatccgtacctgcggtataaccacgccgacgccgagtttcaggagcgtctgcaagaagatacgtcttttgggggcaacctcgggcgagcagtcttccaggccaagaagcgggttctcgaacctctcggtctggttgaggaaggcgctaagacggctcctggaaagaaacgtccggtagagcagtcgccacaagagccagactcctcctcgggcatcggcaagacaggccagcagcccgctaaaaagagactcaattttggtcagactggcgactcagagtcagtccccgatccacaacctctcggagaacctccagcaacccccgctgctgtgggacctactacaatggcttcaggcggtggcgcaccaatggcagacaataacgaaggcgccgacggagtgggtaatgcctcaggaaattggcattgcgattccacatggctgggcgacagagtcatcaccaccagcacccgcacctgggccttgcccacctacaataaccacctctacaagcaaatctccagtgcttcaacgggggccagcaacgacaaccactacttcggctacagcaccccctgggggtattttgatttcaacagattccactgccacttttcaccacgtgactggcagcgactcatcaacaacaattggggattccggcccaagagactcaacttcaaactcttcaacatccaagtcaaggaggtcacgacgaatgatggcgtcacaaccatcgctaataaccttaccagcacggttcaagtcttctcggactcggagtaccagcttccgtacgtcctcggctctgcgcaccagggctgcctccctccgttcccggcggacgtgttcatgattccgcaatacggctacctgacgctcaacaatggcagccaagccgtgggacgttcatccttttactgcctggaatatttcccttctcagatgctgagaacgggcaacaactttaccttcagctacacctttgaggaagcgcctttccacagcagctacgcgcacagccagagcctggaccggctgatgaatcctctcatcgaccaatacctgtattacctgaacagaactcaaaatcagtccggaagtgcccaaaacaaggacttgctgtttagccgtgggtctccagctggcatgtctgttcagcccaaaaactggctacctggaccctgttatcggcagcagcgcgtttctaaaacaaaaacagacaacaacaacagcaattttacctggactggtgcttcaaaatataacctcaatgggcgtgaatccatcatcaaccctggcactgctatggcctcacacaaagacgacgaagacaagttctttcccatgagcggtgtcatgatttttggaaaagagagcgccggagcttcaaacactgcattggacaatgtcatgattacagacgaagaggaaattaaagccactaaccctgtggccaccgaaagatttgggaccgtggcagtcaatttccagagcagcagcacagaccctgcgaccggagatgtgcatgctatgggagcattacctggcatggtgtggcaagatagagacgtgtacctgcagggtcccatttgggccaaaattcctcacacagatggacactttcacccgtctcctcttatgggcggctttggactcaagaacccgcctcctcagatcctcatcaaaaacacgcctgttcctgcgaatcctccggcggagttttcagctacaaagtttgcttcattcatcacccaatactccacaggacaagtgagtgtggaaattgaatgggagctgcagaaagaaaacagcaagcgctggaatcccgaagtgcagtacacatccaattatgcgaaatctgccaacgttgattttactgtggacaacaatggactttatactgagcctcgccccgttggcacccgttaccttacccgtcccctg

SEQ ID NO: 685 - DNA, 2208 bp, synthetic construct
  misc_feature 1..2208: note = Description of Artificial Sequence: Synthetic polynucleotide
  source 1..2208: mol_type = other DNA
atggctgccgatggttatcttccagattggctcgaggacaacctctctgagggcattcgcgagtggtgggacttgaaacctggagccccgaagcccaaagccaaccagcaaaagcaggacgacggccggggtctggtgcttcctggctacaagtacctcggacccttcaacggactcgacaagggggagcccgtcaacgcggcggacgcagcggccctcgagcacgacaaggcctacgaccagcagctcaaagcgggtgacaatccatacctgcggtataaccacgccgacgccgagtttcaggagcgtctgcaagaaaatacgtcttttgggggcaacctcgggcgagcagtcttccaggccaagaagcgggttctcgaacctctcggtctggttgaggaaggcgctaagacggctcctggaaagaaacgtccggtagagcagtcgccacaagagccagactcctcctcgggcatcggcaagacaggccagcagcccgctaaaaagagactcaattttggtcagactggcgactcagagtcagtccccgatccacaacctctcggagaacctccagcaacccccgctgctgtgggacctactacaatggcttcaggcggtggcgcaccaatggcagacaataacgaaggcgccgacggagtgggtaatgcctcaggaaattggcattgcgattccacatggctgggcgacagagtcatcaccaccagcacccgcacctgggccttgcccacctacaataaccacctctacaagcaaatctccagtgcttcaacgggggccagcaacgacaaccactacttcggctacagcaccccctgggggtattttgatttcaacagattccactgccactttccaccacgtgactggcagcgactcatcaacaacaattggggattccggcccaagagactcaacttcaaactcttcaacatccaagtcaaggaggtcacgtcgaatgatggcgtcacaaccatcgctaataaccttaccagcacggttcaagtcttctcggactcggagtaccagcttccgtacgtcctcggctctgcgcaccagggctgcctccctccgttcccggcggacgtgttcatgattccgcaatacggctacctgacgctcaacaatggcagccaagccgtgggacgttcatccttttactgcctggaatatttcccttctcagatgctgagaacgggcaacaactttaccttcagctacacctttgaggaagtgcctttccacagcagctacgcgcacagccagagcctggaccggctgatgaatcctctcatcgaccaatacctgtattacctgaacagaactcaaaatcagtccggaagtgcccaaaacaaggacttgctgtttagccgtgggtctccagctggcatgtctgttcagcccaaaaactggctacctggtccctgttatcggcagcagcgcgtttctaaaacaaaaacagacaacaacaacagcaattttacctggactggtgcttcaaaatataacctcaatgggcgtgaatccatcatcaaccctggcactgctatggcctcacacaaagacgacgaagacaagttctttcccatgagcggtgtcatgatttttggaaaagagagcgccggagcttcaaacactgcattggacaatgtcatgattacagacgaagaggaaattaaagccactaaccctgtggccaccgaaagatttgggaccgtggcagtcaatttccagagcagcagcacagaccctgcgaccggagatgtgcatgctatgggagcattacctggcatggtgtggcaagatagagacgtgtacctgcagggtcccatttgggccaaaattcctcacacagatggacactttcacccgtctcctcttatgggcggctttggactcaagaacccgcctcctcagatcctcatcaaaaacacgcctgttcctgcgaatcctccggcggagttttcagctacaaagtttgcttcattcatcacccaatactccacaggacaagtgagtgtggaaattgaatgggagctgcagaaagaaaacagcaagcgctggaatcccgaagtgcagtacacatccaattatgcaaaatctgccaacgttgattttactgtggacaacaatggactttatactgagcctcgccccattggcacccgttaccttacccgtcccctg

SEQ ID NO: 686 - DNA, 2208 bp, synthetic construct
  misc_feature 1..2208: note = Description of Artificial Sequence: Synthetic polynucleotide
  source 1..2208: mol_type = other DNA
atggctgccgatggttatcttccagattggctcgaggacaacctctctgagggcattcgcgagtggtgggacttgaaacctggagccccgaagcccaaagccaaccagcaaaagcaggacgacggccggggtctggtgcttcctggctacaagtacctcggacccttcaacggactcgacaagggggagcccgtcaacgcggcggacgcagcggccctcgagcacgacaaggcctacgaccagcagctcaaagcgggtgacaatccgtacctgcggtataaccacgccgacgccgagtttcaggagcgtctgcaagaagatacgtcttttgggggcaacctcgggcgagcagtcttccaggccaagaagcgggttctcgaacctctcggtctggttgaggaaggcgctaagacggctcctggaaagaaacgtccggtagagcagtcgccacaagagccagactcctcctcgggcatcggcaagacaggccagcagcccgctaaaaagagactcaattttggtcagactggcgactcagagtcagtccccgatccacaacctctcggagaacctccagcaacccccgctgctgtgggacctactacaatggcttcaggcggtggcgcaccaatggcagacaataacgaaggcgccgacggagtgggtaatgcctcaggaaattggcattgcgattccacatggctgggcgacagagtcatcaccaccagcacccgcacctgggccttgcccacctacaataaccacctctacaagcaaatctccagtgcttcaacgggggccagcaacgacaaccactacttcggctacagcaccccctgggggtattttgatttcaacagattccactgccacttttcaccacgtgactggcagcgactcatcaacaacaattggggattccggcccaagagactcaacttcaaactcttcaacatccaagtcaaggaggtcacgacgaatgatggcgtcacaaccatcgctaataaccttaccagcacggttcaagtcttctcggactcggagtaccagcttccgtacgtcctcggctctgcgcaccagggctgcctccctccgttcccggcggacgtgttcatgattccgcaatacggctacctgacgctcaacaatggcagccaagccgtgggacgttcatccttttactgcctggaatatttcccttctcagatgctgagaacgggcaacaactttaccttcagctacacctttgaggaagtgcctttccacagcagctacgcgcacagccagagcctggaccggctgatgaatcctctcatcgaccaatacctgtattacctgaacagaactcaaaatcagtccggaagtgcccaaaacaaggacttgctgtttagccgtgggtctccagctggcacgtctgttcagcccaaaaactggctacctggaccctgttatcggcagcagcgcgtttctaaaacaaaaacagacaacaacaacagcaattttacctggactggtgcttcaaaatataacctcaatgggcgtgaatccatcatcaaccctggcactgctatggcctcacacaaagacgacgaagacaagttctttcccatgagcggtgtcatgatttttggaaaagagagcgccggagcttcaaacactgcattggacaatgtcatgattacagacgaagaggaaattaaagccactaaccctgtggccaccgaaagatttgggaccgtggcagtcaatttccagagcagcagcacagaccctgcgaccggagatgtgcatgctatgggagcattacctggcatggtgtggcaagatagagacgtgtacctgcagggtcccatttgggccaaaattcctcacacagatggacactttcacccgtctcctcttatgggcggctttggactcaagaacccgcctcctcagatcctcatcaaaaacacgcctgttcctgcgaatcctccggcggagttttcagctacaaagtttgcttcattcatcacccaatactccacaggacaagtgagtgtggaaattgaatgggagctgcagaaagaaaacagcaagcgctggaatcccgaagtgcagtacacatccaattatgcaaaatctgccaacgttgattttactgtggacaacaatggactttatactgggcctcgccccattggcacccgttaccttacccgtcccctg

SEQ ID NO: 687 - DNA, 2208 bp, synthetic construct
  misc_feature 1..2208: note = Description of Artificial Sequence: Synthetic polynucleotide
  source 1..2208: mol_type = other DNA
atggctgccgatggttatcttccagattggctcgaggacaacctctctgagggcattcgcgagtggtgggacttgaaacctggagccccgaagcccaaagccaaccagcaaaagcaggacgacggccggggtctggtgcttcctggctacaagtacctcggacccttcaacggactcgacaagggggagcccgtcaacgcggcggacgcagcggccctcgagcacgacaaggcctacgaccagcagctcaaagcgggtgacaatccgtacctgcggtataaccacgccgacgccgagtttcaggagcgtctgcaagaagatacgtcttttgggggcaacctcgggcgagcagtcttccaggccaagaagcgggttctcgaacctctcggtctggttgaggaaggcgctaagacggctcctggaaagaaacgtccggtagagcagtcgccacaagagccagactcctcctcgggcatcggcaagacaggccagcagcccgctaaaaagagactcaattttggtcagactggcgactcagagtcagtccccgatccacaacctctcggagaacctccagcaacccccgctgctgtgggacctactacaatggcttcaggcggtggcgcaccaatggcagacaataacgaaggcgccgacggagtgggtaatgccccaggaaattggcattgcgactccacatggctgggcgacagagtcatcaccaccagcacccgcacctgggccttgcccacctacaataaccacctctacaagcaaatctccagtgcttcaacgggggccagcaacgacaaccactacttcggctacagcaccccctgggggtattttgatttcaacagattccactgccacttttcaccacgtgactggcagcgactcatcaacaacaattggggattccggcccaagagactcaacttcaaactcttcaacatccaagtcaaggaggtcacgacgaatgatggcgtcacaaccatcgctaataaccttaccagcacggttcaagtcttctcggactcggagtaccagcttccgtacgtcctcggctctgcgcaccagggctgcctccctccgttcccggcggacgtgttcatgattccgcaatacggctacctgacgctcaacaatggcagccaagccgtgggacgttcatccttttactgcctggaatatttcccttctcagatgctgagaacgggcaacaactttaccttcagctacacctttgaggaagtgcctttccacagcagctacgcgcacagccagagcctggaccggctgatgaatcctctcatcgaccaatacctgtattacctgaacagaactcaaaatcagtccggaagtgcccaaaacaaggacttgctgtttagccgtgggtctccagctggcatgtctgttcagcccaaaaactggctacctggaccctgttatcggcagcagcgcgtttctaaaacaaaaacagacaacaacaacagcaattttacctggactggtgcttcaaaatataacctcaatgggcgtgaatccatcatcaaccctggcacagctatggcctcacacaaagacgacgaagacaagttctttcccatgagcggtgtcatgatttttggaaaagagagcgccggagcttcaaacactgcattggacaatgtcatgattacaggcgaagaggaaattaaagccactaaccctgtggccaccgaaagatttgggaccgtggcagtcaatttccagagcagcagcacagaccctgcgaccggagatgtgcatgctatgggagcattacctggcatggtgtggcaagatagagacgtgtacctgcagggtcccatttgggccaaaattcctcacacagatggacactttcacccgtctcctcttatgggcggctttggactcaagaacccgcctcctcagatcctcatcaaaaacacgcctgttcctgcgaatcctccggcggagttttcagctacaaagtttgcttcattcatcacccaatactccacaggacaagtgagtgtggaaattgaatgggagctgcagaaagaaaacagcaagcgctggaatcccgaagtgcagtacacatccaattatgcaaaatctgccaacgttgattttactgtggacaacaatggactttatactgagcctcgccccattggcacccgttaccttacccgtcccctg

SEQ ID NO: 688 - DNA, 2208 bp, synthetic construct
  misc_feature 1..2208: note = Description of Artificial Sequence: Synthetic polynucleotide
  source 1..2208: mol_type = other DNA
atggctgccgatggttatcttccagattggctcgaggacaacctctctgagggcattcgcgagtggtgggacttgaaacctggagccccgaagcccaaagccaaccagcaaaagcaggacgacggccggggtctggtgcttcctggctacaagtacctcggacccttcaacagactcgacaagggggagcccgtcaacgcggcggacgcagcggccctcgagcacgacaaggcctacgaccagcagctcaaagcgggtgacaatccgtacctgcggtataaccacgccgacgccgagtttcaggagcgtctgcaagaagatacgtcttttgggggcaacctcgggcgagcagtcttccaggccaagaagcgggttctcgaacctctcggtctggttgaggaaggcgctaagacggctcctggaaggaaacgtccggtagagcagtcgccacaagagccagactcctcctcgggcatcggcaagacaggccagcagcccgctaaaaagagactcaattttggtcagactggcgactcagagtcagtccccgatccacaacctctcggagaacctccagcaacccccgctgctgtgggacctactacaatggcttcaggcggtggcgcgccaatggcagacaataacgaaggcgccgacggagtgggtaatgcctcaggaaattggcattgcgattccacatggctgggcgacagagtcatcaccaccagcacccgcacctgggccttgcccacctacaataaccacctctacaagcaaatctccagtgcttcaacgggggccagcaacgacaaccactacttcggctacagcaccccctgggggtattttgatttcaacagattccactgccacttttcaccacgtgactggcagcgactcatcaacaacaattggggattccggcccaagagactcaacttcaaactcttcaacatccaagtcaaggaggtcacgacgaatgatggcgtcacaaccatcgctaataaccttaccagcacggttcaagtcttctcggactcggagtaccagcttccgtacgtcctcggctctgcgcaccagggctgcctccctccgttcccggcggacgtgttcatgattccgcaatacggctacctgacgctcaacaatggcggccaagccgtgggacgttcatccttttactgcctggaatatttcccttctcagatgctgagaacgggcaacaactttaccttcagctacacctttgaggaagtgcctttccacagcagctacgcgcacagccagagcctggaccggctgatgaatcctctcatcgaccaatacctgtattacctgaacagaactcaaaatcagtccggaagtgcccaaaacaaggacttgctgtttagccgtgggtctccagctggcatgtctgttcagcccaaaaactggctacctggaccctgttatcggcagcagcgcgtttctaaaacaaaaacagacaacaacaacagcaattttacctggactggtgcttcaaaatatagcctcaatgggcgtgaatccatcatcaaccctggcactgctatggcctcacacaaagacgacgaagacaagttctttcccatgggcggtgtcatgatttttggaaaagagagcgccggagcttcaaacactgcattggacaatgccatgattacagacgaagaggaaattaaagccactaaccctgtggccaccgaaagatttgggaccgtggcagtcaatttccagagcagcagcacagaccctgcgaccggagatgtgcatgctatgggagcattacctggcatggtgtggcaagatagagacgtgtacctgcagggtcccatttgggccaaaattcctcacacagatggacactttcacccgtctcctcttatgggcggctttggactcaagaacccgcctcctcagatcctcatcaaaaacacgcctgttcctgcgaatcctccggcggagttttcagctacaaagtttgcttcattcatcacccaatactccacaggacaagtgagtgtggaaattgaatgggagctgcagaaagaaaacagcaagcgctggaatcccgaagtgcagtacacatccaattatgcaaaatctgccaacgttgattttactgtggacaacaatggactttatactgagcctcgccccattggcacccgttaccttacccgtcccctg

SEQ ID NO: 689 - DNA, 2208 bp, synthetic construct
  misc_feature 1..2208: note = Description of Artificial Sequence: Synthetic polynucleotide
  source 1..2208: mol_type = other DNA
atggctgccgatggttatcttccagattggctcgaggacaacctctctgagggcattcgcgagtggtgggacttgaaacctggagccccgaagcccaaagccaaccagcaaaagcaggacgacggccggggtctggtgcttcctggctacaagtacctcggacccttcaacggactcgacaagggggagcccgtcaacgcggcggacgcagcggccctcgagcacgacaaggcctacgaccagcagctcaaagcgggtgacaatccgtacctgcggtataaccacgccgacgccgagtttcaggagcgtctgcaagaagatacgtcttttgggggcaacctcgggcgagcagtcttccaggccaagaagcgggttctcgaacctctcggtctggttgaggaaggcgctaagacggctcctggaaagaaacgtccggtagagcagtcgccacaagagccagactcctcctcgggcatcggcaagacaggccagcagcccgctaaaaagagactcaattttggtcagactggcgactcagagtcagtccccgatccacaacctctcggagaacctccagcaacccccgctgctgtgggacctactacaatggcttcaggcggtggcgcaccaatggcagacaataacgaaggcgccgacggagtgggtaatgcctcaggaaattggcattgcgattccacatggctgggcggcagagtcatcaccaccagcacccgcacctgggccttgcccacctacaataaccacctctacaagcaaatctccagtgcttcaacgggggccagcaacgacaaccactacttcggctacagcaccccctgggggtattttgatttcaacagattccactgccacttttcaccacgtgactggcagcgactcatcaacaacaattggggattccggcccaagagactcaacttcaaactcttcaacatccaagtcaaggaggtcacgacgaatgatggcgtcacaaccatcgctaataaccttaccagcacggttcaagtcttctcggactcggagtaccagcttccgtacgtcctcggctctgcgcaccagggctgcctccctccgttcccggcggacgtgttcatgattccgcaatacggctacctgacgctcaacaatggcagccaagccgtgggacgttcatccttttactgcctggaatatttcccttctcagatgctgagaacgggcaacaactctaccttcagctacacctttgaggaagtgcctttccacagcagctacgcgcacagccagagcctggaccggctgatgaatcctctcatcgaccaatacctgtattacctgaacagaactcaaaatcagtccggaagtgcccaaaacaaggacttgctgtttagccgtgggtctccagctggcatgtctgttcagcccaaaaactggctacctggaccctgttatcggcagcagcgcgtttctaaaacaaaaacagacaacaacaacagcaattttacctggactggtgcttcaaaatataacctcaatgggcgtgaatccatcatcaaccctggcactgctatggcctcacacaaagacgacgaagacaagttctttcccatgagcggtgtcatgatttttggaaaagagagcgccggagcttcaaacactgcattggacaatgtcatgattacagacgaagaggaaattaaagccactaaccctgtggccaccgaaagatttgggaccgtggcagtcaatttccagagcagcagcacagaccctgcgaccggagatgtgcatgctatgggaacattacctggcatggtgtggcaagatagagacgtgtacctgcagggtcccatttgggccaaaattcctcacacagatggacactttcacccgtctcctcttatgggcggctttggactcaagaacccgcctcctcagatcctcatcaaaaacacgcctgttcctgcgaatcctccggcggagttttcagctacaaagtttgcttcattcatcacccaatactccacaggacaagtgagtgtggaaattgaatgggagctgcagaaagaaaacagcaagcgctggaatcccgaagtgcagtacacatccaattatgcaaaatctgccaacgttgattttactgtggacaacaatggactttatactgagcctcgccccattggcacccgttaccttacccgtcccctg

SEQ ID NO: 690 - DNA, 2208 bp, synthetic construct
  misc_feature 1..2208: note = Description of Artificial Sequence: Synthetic polynucleotide
  source 1..2208: mol_type = other DNA
atggctgccgatggttatctcccagattggctcgaggacaacctctctgagggcattcgcgagtggtgggacttgaaacctggagccccgaagcccaaagccaaccagcaaaagcaggacgacggccggggtctggtgcttcctggctacaagtacctcggacccttcaacggactcgacaagggggagcccgtcagcgcggcggacgcagcggccctcgagcacgacaaggcctacgaccagcagctcaaagcgggtgacaatccgtacctgcggtataaccacgccgacgccgagtttcaggagcgtctgcaagaagatacgtcttttgggggcaacctcgggcgagcagtcttccaggccaagaagcgggttctcgaacctctcggtctggttgaggaaggcgctaagacggctcctggaaagaaacgtccggtagagcagtcgccacaagagccagactcctcctcgggcatcggcaagacaggccagcagcccgctaaagagagactcaattttggtcagactggcgactcagagtcagtccccgatccacaacctctcggagaacctccagcaacccccgctgctgtgggacctactacaatggcttcaggcggtggcgcaccaatggcagacaataacgaaggcgccgacggagtgggtaatgcctcaggaaattggcattgcgattccacatggctgggcgacagagtcatcaccaccagcacccgcacctgggccttgcccacctacaataaccacctctacaagcaaatctccagtgcttcaacgggggccagcaacgacaaccactacttcggctacagcaccccctgggggtattttgatttcaacagattccactgccacttttcaccacgtgactggcagcgactcatcaacaacaattggggattccggcccaagagactcaacttcaaactcttcaacatccaagtcaaggaggtcacgacgaatgatggcgtcacaaccatcgccaataaccttaccagcacggttcaagtcttctcggactcggagtaccagcttccgtacgtcctcggctctgcgcaccagggctgcctccctccgttcccggcggacgtgttcatgattccgcaatacggctacctgacgctcaacaatggcagccaagccgtgggacgttcatccttttactgcctggaatatttcccttctcagatgctgagaacgggcaacaactttaccttcagctacacctttgaggaagtgcctttccacagcagctacgcgcacagccagagcctggaccggctgatgaatcctctcatcgaccaatacctgtattacctgaacagaactcaaaatcagtccggaagtgcccaaaacaaggacttgctgtttagccgtgggtctccagctggcatgtctgttcagcccaaaaactggctacctggaccctgttatcggcagcagcgcgtttctaaaacaaaaacagacaacaacaacagcaattttacctggactggtgcttcaaaatataacctcaatgggcgtgaatccatcatcaaccctggcactgctatggcctcacacaaagacgacgaagacaagttctttcccatgagcggtgtcatgatttttggaaaagagagcgccggagcttcaaacactgcattggacaatgtcatgattacagacgaagaggaaattaaagccactaaccctgtggccaccgaaagatttgggaccgtggcagtcaatttccagagcagcagcacagaccctgcgaccggagatgtgcatgctatgggagcattacctggcatggtgtggcaagatagagacgtgtacctgcagggtcccatttgggccaaaattcctcacacagatggacactttcacccgtctcctcttatgggcggctttggactcaagaacccgcctcctcagatcctcatcaaaaacacgcctgttcctgcgaatcctccggcggagttttcagctacaaagtttgcttcattcatcacccaatactccacaggacaagtgagtgtggaaattgaatgggagctgcagaaagaaaacagcaagcgctggaatcccgaagtgcagtacacatccaattatgcaaaatctgccaacgttgattttactgtggacaacaatggactttatactgagcctcgccccattggcacccgttaccttacccgtcccctg

SEQ ID NO: 691 - DNA, 2208 bp, synthetic construct
  misc_feature 1..2208: note = Description of Artificial Sequence: Synthetic polynucleotide
  source 1..2208: mol_type = other DNA
atggctgccgatggttatcttccagattggctcgaggacaacctctctgagggcattcgcgagtggtgggacttgaaacctggagccccgaagcccaaagccaaccagcaaaagcaggacgacggccggggtctggtgcttcctggctacaagtacctcggacccttcaacggactcgacaagggggagcccgtcaacgcggcggacgcagcggccctcgagcacgacaaggcctacgaccagcagctcaaagcgggtgacaatccgtacctgcggtataaccacgccgacgccgagtttcaggagcgtctgcaagaagatacgtcttttgggggcaacctcgggcgagcagtcttccaggccaagaagcgggttctcgaacctctcggtctggttgaggaaggcgctaagacggctcctggaaagaaacgtccggtagagcagtcgccacaagagccagactcctcctcgggcatcggcaagacaggccagcagcccgctaaaaagagactcaattttggtcagactggcgactcagagtcagtccccgatccacaacctctcggagaacctccagcaacccccgctgctgtgggacctactacaatggcttcaggcggtggcgcaccaatggcagacaataacgaaggcgccgacggagtgggtaatgcctcaggaaattggcattgcgattccacatggctgggcgacagagtcatcaccaccagcacccgcacctgggccttgcccacctacaataaccacctctacaagcaaatctccagtgcttcaacgggggccagcaacgacaaccactacttcggctacagcaccccctgggggtattttgatttcaacagattccactgccacttttcaccacgtgactggcagcgactcatcaacaacaattggggattccggcccaagagactcaacttcaaactcttcaacatccaagtcaaggaggtcacgacgaatgatggcgtcacaaccatcgctaataaccttaccagcacggttcaagtcttctcggactcggagtaccagcttccgtacgtcctcggctctgcgcaccagggctgcctccctccgttcccggcggacgtgttcatgattccgcaatacggctacctgacgctcaacaatggcagccaagccgtgggacgttcatccttttactgcctggaatatttcccttctcagatgctgagaacgggcaacaactttaccttcagctacacctttgaggaagtgcctttccacagcagctacgcgcacagccagagcctggaccggctgatgaatcctctcatcgaccaatacctgtattacctgaacagaactcaaaatcagtccggaagtgcccaaaacaaggacttgctgtttagccgtgggtctccagctggcatgtctgttcagcccaaaaactggctacctggaccctgttatcggcagcagcgcgtttctaaaacaaaaacagacaacaacaacagcaattttacctggactggtgcttcaaaatataacctcaatgggcgtgaatccatcatcaaccctggcactgctatggcctcacacaaagacgacgaagacaagttctttcccatgagcggtgtcatgatttttggaaaagagagcgccggagcttcaaacactgcattggacaatgtcatgattacagacgaaggggaaattaaagccactaaccctgtggccaccgaaagatttgggaccgtggcagtcaatttccagagcagcagcacagaccctgcgaccggagatgtgcatgctatgggagcattacctggcatggtgtggcaagatagagacgtgtacctgcagggtcccatttgggccaaaattcctcacacagatggacactttcacccgtctcctcttatgggcggctttggactcaagaacccgcctcctcagatcctcatcaaaaacacgcctgttcctgcgaatcctccggcggagttttcagctacaaagtttgcttcattcatcacccaatactccacaggacaagtgagtgtggaaattgaatgggagctgcagaaagaaaacagcaagcgctggaatcccgaagtgcagtacacatccaattatgcaaaatctgccaacgttgattttactgtggacaacaatggactttatactgagcctcgccccattggcacccgttaccttacccgtcccctg

SEQ ID NO: 692 - DNA, 2208 bp, synthetic construct
  misc_feature 1..2208: note = Description of Artificial Sequence: Synthetic polynucleotide
  source 1..2208: mol_type = other DNA
atggctgccgatggttatcttccagattggctcgaggacaacctctctgagggcattcgcgagtggtgggacttgaaacctggagccccgaaacctaaagccaaccagcaaaagcaggacgacggccggggtctggtgcttcctggctacaagtacctcggacccttcaacggactcgacaagggggagcccgtcaacgcggcggacgcagcggccctcgagcacgacaaggcctacgaccagcagctcaaagcgggtgacaatccgtacctgcggtataaccacgccgacgccgagtttcaggagcgtctgcaagaagatacgtcttttgggggcaacctcgggcgagcagtcttccaggccaagaagcgggttctcgaaccttttggtctggttgaggaaggcgctaagacggctcctggaaagaaacgtccggtagagcagtcgccacaagagccagactcctcctcgggcatcggcaagacaggccagcagcccgctaaaaagagactcaattttggtcagactggcgactcagagtcagtccccgacccacaacctctcggagaacctccagcaacccccgctgctgtgggacctactacaatggcttcaggcggtggcgcaccaatggcagacaataacgaaggcgccgacggagtgggtaatgcctcaggaaattggcattgcgattccacatggctgggcgacagagtcatcaccaccagcacccgcacctgggccttgcccacctacaataaccacctctacaagcaaatctccagtgcttcaacgggggccagcaacgacaaccactacttcggctacagcaccccctgggggtattttgatttcaacagattccactgccacttttcaccacgtgactggcagcgactcatcaacaacaattggggattccggcccaagagactcaacttcaagctcttcaacatccaagtcaaggaggtcacgacgaacgatggcgtcacgaccatcgctaataaccttaccagcacggttcaagtcttctcggattcagagtaccaactgccgtacgtcctcggctctgcgcaccagggctgcctccctccgttcccggcggacgtgtttatgattccgcagtacggctacctaacgctcaacaatggcagccaggccgtgggacgttcatccttttactgcccggaatatttcccttctcagatgctgagaacgggcaacaactttaccttcagctacacctttgaggaagtgcctttccacagcagctacgcgcacagccagagcctggaccggctgatgaatcctctcatcgaccaatacctgtattacctgaacagaactcaaaatcagtccggaagtgcccaaaacaaggacttgctgtttagccgtgggtctccagctggcatgtctgttcagcccaaaaactggctacctggaccctgttatcggcagcagcgcgtttctaaaacaaaaacagacaacaacaacagcaattttacctggactggtgcttcaaaatataacctcaatgggcgtgaatccatcatcaaccctggcactgctatggcctcacacaaagacgacaaagacaagttctttcccatgagcggtgtcatgatttttggaaaagagagcgccggagcttcaaatactgcattggacaatgtcatgatcacagatgaagaggaaattaaagccactaaccctgtggccaccgaaagatttgggaccgtggcagtcaatttccagagcagcaacacagaccccgcgaccggagatgtgcatgttatgggagccttacctggcatggtgtggcaagacagagacgtatacctgcagggtcccatttgggccaaaattcctcacacggatggacactttcacccgtctcctctcatgggcggctttggacttaagcacccgcctcctcaaatcctcatcaaaaacacgcctgttcctgcgaatcctccggcagagttttcggctacaaagtttgcttcattcatcacccagtactccacaggacaagtgagtgtggaaattgaatgggagctgcagaaagaaaacagcaagcgctggaatcccgaagtgcagtacacatccaattatgcaaaatctgccaacgttgatttcactgtggacaacaatggactttatactgagcctcgccccattggcacccgttaccttacccgtcccttg

SEQ ID NO: 693 - DNA, 2208 bp, synthetic construct
  misc_feature 1..2208: note = Description of Artificial Sequence: Synthetic polynucleotide
  source 1..2208: mol_type = other DNA
atggctgccgatggttatcttccagattggctcgaggacaacctctctgagggcattcgcgagtggtgggacttgaaacctggagccccgaaacctaaagccaaccagcaaaagcaggacgacggccggggtctggtgcttcctggctacaagtacctcggacccttcaacggactcgacaagggggagcccgtcaacgcggcggacgcagcggccctcgagcacgacaaggcctacgaccagcagctcaaagcgggtgacaatccgtacctgcggtataaccacgccgacgccgagtttcaggagcgtctacaagaagatacgtcttttgggggcaacctcgggcgagcagtcttccaggccaagaagcgggttctcgaaccttttggtctggttgaggaaggcgctaagacggctcctggaaagaaacgtccggtagagcagtcgccacaagagccagactcctcctcgggcatcggcaagacaggccagcagcccgctaaaaagagactcaattttggtcagactggcgactcagagtcagtccccgacccacaacctctcggagaacctccagcaacccccgctgctgtgggacctactacaatggcttcaggcggtggcgcaccaatggcagacaataacgaaggcgccgacggagtgggtaatgcctcaggaaattggcattgcgattccacatggctgggcgacagagtcatcaccaccagcacccgcacctgggccttgcccacctacaataaccacctctacaagcaaatctccagtgcttcaacgggggccagcaacgacaaccactacttcggctacagcaccccctgggggtattttgatttcaacagattccactgccacttttcaccacgtgactggcagcgactcatcaacaacaattggggattccggcccaagagactcaacttcaagctcttcaacatccaagtcaaggaggtcacgacgaacgatggcgtcacgaccatcgctaataaccttaccagcacggttcaagtcttctcggattcagagtaccaactgccgtacgtcctcggctctgcgcaccagggctgcctccctccgttcccggcggacgtgttcatgattccgcagtacggctacctaacgctcaacaatggcagccaggccgtgggacgttcatccttttactgcctggaatatttcccttctcagatgctgagaacgggcaacaactttaccttcagctacacctttgaggaagtgcctttccacagcagctacgcgcacagccagagcctggaccggctgatgaatcctctcatcgaccaatacctgtattacctgaacagaactcaaaatcagtccggaagtgcccaaaacaaggacttgctgtttagccgtgggtctccagctggcatgtctgttcagcccaaaaactggctacctggaccctgttatcggcagcagcgcgtttctaaaacaaaaacagacaacaacaacagcaattttacctggactggtgcttcaaaatataacctcaatgggcgtgaatccatcatcaaccctggcactgctatggcctcacacaaagacgacaaagacaagttctttcccatgagcggtgtcatgatttttggaaaagagagcgccggagcttcaaatactgcattggacaatgtcatgatcacagatgaagaggaaattaaagccactaaccctgtggccaccgaaagatttgggaccgtggcagtcaatttccagagcagcgacacagaccccgcgaccggagatgtgcatgttatgggagccttacctggcatggtgtggcaagacagagacgtatacctgcagggtcccatttgggccaaaattcctcacacggatggacactttcacccgtctcctctcatgggcggctttggacttaagcacccgcctcctcaaatcctcatcaaaaacacgcctgttcctgcgaatcctccggcagagttttcggctacaaagtttgcttcattcatcacccagtactccacaggacaagtgagtgtggaaattgaatgggagctgcagaaagaaaacagcaagcgctggaatcccgaagtgcagtacacatccaattatgcaaaatctgccaacgttgatttcactgtggacaacaatggactttatactgagcctcgccccattggcacccgttaccttacccgtcccttg

SEQ ID NO: 694 - DNA, 2208 bp, synthetic construct
  misc_feature 1..2208: note = Description of Artificial Sequence: Synthetic polynucleotide
  source 1..2208: mol_type = other DNA
atggctgccgatggttatcttccagattggctcgaggacaacctctctgagggcattcgcgagtggtgggacttgaaacctggagccccgaaacctaaagccaaccagcaaaagcagggcgacggccggggtctggtgcttcctggctacaagtacctcggacccttcaacggactcgacaagggggagcccgtcaacgcggcggacgcagcggccctcgagcacgacaaggcctacgaccagcagctcaaagcgggtgacaatccgtacctgcggtataaccacgccgacgccgagtttcaggagcgtctgcaagaagatacgtcttttgggggcaacctcgggcgagcagtcttccaggccaagaagcgggttctcgaaccttttggtctggttgaggaaggcgctaagacggctcctggaaagaaacgtccggtagagcagtcgccacaagagccagactcctcctcgggcatcggcaagacaggccagcagcccgctaaaaagagactcaattttggtcagactggcgactcagagtcagtccccgacccacaacctctcggagaacctccagcaacccccgctgctgtgggacctactacaatggcttcaggcggtggcgcaccaatggcagacaataacgaaggcgccgacggagtgggtaatgcctcaggaaattggcattgcgattccacatggctgggcgacagagtcatcaccaccaacactcgcacctgggccttgcccacctacaataaccacctctacaagcaaatctccagtgcttcaacgggggccagcaacgacaaccactacttcggctacagcaccccctgggggtattttgatttcaacagattccactgccacttttcaccacgtgactggcagcgactcatcaacaacaattggggattccggcccaagagactcaacttcaagctcttcaacatccaagtcaaggaggtcacgacgaacgatggcgtcacgaccatcgctaataaccttaccagcacggttcaagtcttctcggattcagagtaccaactgccgtacgtcctcggctctgcgcaccagggctgcctccctccgttcccggcggacgtgttcatgattccgcagtacggctacctaacgctcaacaatggcagccaggccgtgggacgttcatccttttactgcctggaatatttcccttctcagatgctgagaacgggcaacaactttaccttcagctacacctttgaggaagtgcctttccacagcagttacgggcacagccagagcctggaccggctgatgaatcttctcatcgaccaatacctgtattacctgaacagaactcaaaatcagtccggaagtgcccaaaacaaggacttgctgtttagccgtgggtctccagctggcatgtttgttcagcccaaaaactggctacctggaccctgttatcggcagcagcgcgtttctaaaacaaaaacagacaacaacaacagcaattttacctggactggtgcttcaaaatataacctcaatgggcgtgaatccatcatcaaccctggcactgctatggcctcacacaaagacgacgaagacaagttctttcccatgagcggtgtcatgatttttggaaaagagagcgccggagcttcaaatactgcattggacaatgtcatgatcacagatgaagaggaaattaaagccactaaccctgtggccaccgaaagatttgggaccgtggcagtcaatttccagagcagcagcacagaccccgcgaccggagatgtgcatgttatgggagccttacctggcatggtgtggcaagacagagacgtatacctgcagggtcccatttgggccaaaattcctcacacggatggacactttcacccgtctcctctcatgggcggctttggacttaagcacccgcctcctcaaatcctcatcaaaaacacgcctgttcctgcgaatcctccggcagagttttcggctacaaagtttgcttcattcatcacccagtactccacaggacaagtgagtgtggaaattgaatgggagctgcagaaagaaaacagcaagcgctggaatcccgaagtgcagtacacatccaattatgcaaaatctgccaacgttgatttcactgtggacaacaatggactttatactgagcctcgccccattggcacccgttaccttacccgtcccttg

SEQ ID NO: 695 - DNA, 2208 bp, synthetic construct
  misc_feature 1..2208: note = Description of Artificial Sequence: Synthetic polynucleotide
  source 1..2208: mol_type = other DNA
atggctgccgatggttatcttccagattggctcgaggacaacctctctgagggcattcgcgagtggtgggacttgaaacctggagccccgaaacctaaagccaaccagcaaaagcaggacgacggccggggtctggtgcttcctggctacaagtacctcggacccttcaacggactcgacaagggggagcccgtcaacgcggcggacgcagcggccctcgagcacgacaaggcctacgaccagcagctcaaagcgggtgacaatccgtacctgcggtataaccacgccgacgccgagtttcaggagcgtctgcaagaagatacgtcttttgggggcaacctcgggcgagcagtcttccaggccaagaagcgggttctcgaaccttttggtctggttgaggaaggcgctaagacggctcctggaaagaaacgtccggtagagcagtcgccacaagagccagactcctcctcgggcatcggcaagacaggccagcagcccgctaaaaagagactcaattttggtcagactggcgactcagagtcagtccccgacccacaacctctcggagaacctccagcaacccccgctgctgtgggacctactacaatggcttcaggcggtggcgcaccaatggcagacaataacgaaggcgccgacggagtgggtaatgcctcaggaaattggcattgcgattccacatggctgggcgacagagtcatcaccaccaacacccgcacctgggccttgcccacctacaataaccacctctacaagcaaatctccagtgcttcaacgggggccagcaacgacaaccactacttcggctacagcaccccctgggggtattttgatttcaacagattccactgccacttttcaccacgtgactggcagcgactcatcaacaacaattggggattccggcccaagagactcaacttcaagctcttcaacatccaagtcaaggaggtcacgacgaacgatggcgtcacgaccatcgctaataaccttaccagcacggttcaagtcttctcggattcagagtaccaactgccgtacgtcctcggctctgcgcaccagggctgcctccctccgttcccggcggacgtgttcatgattccgcagtacggctacctaatgctcaacaatggcagccaggccgtgggacgttcatccttttactgcctggaatatttcccttctcagatgctgagaacgggcaacaactttaccttcagctacacctttgaggaagtgcctttccacagcagctacgcgcacagccagagcctggaccggctgatgaatcctctcatcgaccaatacctgtattacctgaacagaactcaaaatcagtccggaagtgcccaaaacaaggacttgctgtttagccgtgggtctccagctggcatgtctgttcagcccaaaaactggctacctggaccctgttatcggcagcagcgcgtttctaaaacaaaaacagacaacaacaacagcaattttacctggactggtgcttcaaaatataacctcaatgggcgtgaatccatcatcaaccctggcactgctatggcctcacacaaagacgacgaagacaagttctttcccatgagcggtgtcatgatttttggaaaagagagcgccggagcttcaaatactgcattggacaatgtcatgatcacagatgaagaggaaattaaagccactaaccctgcggccaccgaaagatttgggaccgtggcagtcaatttccagagcagcagcacagaccccgcgaccggagatgtgcatgttatgggagccttacctggcatggtgtggcaagacagagacgtatacctgcagggtcccatttgggccaaaattcctcacacggatggacactttcacccgtctcctctcatgggcggctttggacttaagcacccgcctcctcaaatcctcatcaaaaacacgcctgttcctgcgaatcctccggcagagttttcggctacaaagtttgcttcattcatcacccagtactccacaggacaagtgagtgtggaaattgaatgggagctgcagaaagaaaacagcaagcgctggaatcccgaagtgcagtacacatccaattatgcaaaatctgccaacgttgatttcactgtggacaacaatggactttatactgagcctcgccccattggcacccgttaccttacccgtcccttg

SEQ ID NO: 696 - DNA, 2208 bp, synthetic construct
  misc_feature 1..2208: note = Description of Artificial Sequence: Synthetic polynucleotide
  source 1..2208: mol_type = other DNA
atggctgccgatggttatcttccagattggctcgaggacaacctctctgagggcattcgcgagtggtgggacttgaaacctggagccccgaaacctaaagccaaccagcaaaagcaggacgacggccggggtctggtgcttcctggctacaagtacctcggacccttcaacggactcgacaagggggagcccgtcaacgcggcggacgcagcggccctcgagcacgacaaggcctacgaccagcagctcaaagcgggtgacaatccgtacctgcggtataaccacgccgacgccgagtttcaggagcgtctgcaagaagatacgtcttttgggggcaacctcgggcgagcagtcttccaggccaagaagcgggttctcgaaccttttggtctggttgaggaaggcgctaagacggctcctggaaagaaacgtccggtagagcagtcgccacaagagccagactcctcctcgggcatcggcaagacgggccagcagcccgctaaaaagagactcaattttggtcagactggcgactcagagtcagtccccgacccacaacctctcggagaacctccagcaacccccgctgctgtgggacctactacaatggcttcaggcggtggcgcaccaatggcagacaataacgaaggcgccgacggagtgggtaatgcctcaggaaattggcattgcgattccacatggctgggcgacagagtcatcaccaccagcacccgcacctgggccttgcccacctacaataaccacctctacaagcaaatctccagtgcttcaacgggggccagcaacgacaaccactacttcggctacagcaccccctgggggtattttgatttcaacagattccactgccacttttcaccacgtgactggcagcgactcatcaacaacaattggggattccggcccaagagactcaacttcaagctcttcaacatccaagtcaaggaggtcacgacgaacgatggcgtcacgaccatcgctaataaccttaccagcacggttcaagtcttctcggattcagagtaccaactgccgtacgtcctcggctctgcgcaccagggctgcctccctccgttcccggcggacgtgttcatgattccgcagtacggctacctaacgctcaacaatggcagccaggccgtgggacgttcatccttttactgcctggaatatttcccttctcagatgctgagaacgggcaacaactttaccttcagctacacctttgaggaagtgcctttccacagcagctacgcgcacagccagagcctggaccggctgatgaatcctctcatcgaccaatacctgtattacctgaacagaactcaaaatcagtccggaagtgcccaaaacaaggacttgctgtttagccgtgggtctccagctggcatgtccgttcagcccaaaaactggctacctggaccctgttatcggcagcagcgcgtttctaaaacaaaaacagacaacaacaacagcaattttacctggactggtgcttcaaaatataacctcaatgggcgtgaatccatcatcaaccctggcactgctatggcctcacacaaagacgacgaagacaagttctttcccatgagcggtgtcatgatttttggaaaagagagcgccggagcttcaaatactgcattggacaatgtcatgatcacagatgaagaggaaattaaagccactaaccctgtggccaccgaaagatttgggaccgtggcagtcaatttccagagcagcagcacagaccccgcgaccggagatgtgcatgttatgggagccttacctggcatggtgtggcaagacagagacgtatacctgcagggtcccatttgggccaaaattcctcacacggatggacactttcacccgtctcctctcatgggcggctttggacttaagcacccgcctcctcaaatcctcatcaaaaacacgcctgttcctgcgaatcctccggcagagttttcggctacaaagtttgcttcattcatcacccagtactccacaggacaagtgagtgtggaaattgaatgggagctgcagaaagaaaacagcaagcgctggaatcccgaagtgcagtacacatccaattatgcaaaatctgccaacgttgatttcactgtggacaacaatggactttatactgagcctcgccccattggcacccgttaccttacccgtcccttg

SEQ ID NO: 697 - DNA, 2208 bp, synthetic construct
  misc_feature 1..2208: note = Description of Artificial Sequence: Synthetic polynucleotide
  misc_difference 305: note = modified_base - a, c, t, g, unknown or other
  source 1..2208: mol_type = other DNA
atggctgccgatggttatcttccagattggctcgaggacaacctctctgagggcattcgcgagtggtgggacttgaaacctggagccccgaaacctaaagccaaccagcaaaagcaggacgacggccggggtctggtgcttcctggctacaagtacctcggacccttcaacggactcgacaagggggagcccgtcaacgcggcggacgcagcggccctcgagcacgacaaggcctacgaccagcagctcaaagcgggtgacaatccgtacctgcggtataaccacgccgacgccgagtttcaggngcgtctgcaagaagatacgtcttttgggggcaacctcgggcgagcagtcttccaggccaagaagcgggttctcgaaccttttggtctggttgaggaaggcgctaagacggctcctggaaagaaacgtccggtagagcagtcgccacaagagccagactcctcctcgggcatcggcaagacaggccagcagcccgctaaaaagagactcaattttggtcagactggcgactcagagtcagtccccgacccacaacctctcggagaacctccagcaacccccgctgctgtgggacctactacaatggcttcaggcggtggcgcaccaatggcagacaataacgaaggcgccgacggagtgggtaatgcctcaggaaattggcattgcgattccacatggctgggcggcagagtcatcaccaccagcacccgcacctgggccttgcccacctacaataaccacctctacaagcaaatctccagtgcttcaacgggggccagcaacgacaaccactacttcggccacagcaccccctgggggtattttgatttcaacagattccactgccacttttcaccacgtgactggcagcgactcatcaacaacaattggggattccggcccaagagactcaacttcaagctcttcaacatccaagtcaaggaggtcacgacgaacgatggcgtcacgaccatcgctaataaccttaccagcacggttcaagtcttctcggattcagagtaccaactgccgtacgtcctcggctctgcgcaccagggctgcctccctccgtccccggcggacgtgttcatgattccgcagtacggctacctaacactcaacaatggcagccaggccgtgggacgttcatccttttactgcctggaatatttcccttctcagatgctgagaacgggcaacaactttaccttcagctacacctttgaggaagtgcctttccacagcagctacgcgcacagccagagcctggaccggctgatgaatcctctcatcgaccaatacctgtattacctgaacagaactcaaaatcagtccggaagtgcccaaaacaaggacttgctgtttagccgtgggtctccagctggcatgtctgttcagcccaaaaactggctacctggaccctgttatcggcagcagcgcgtttctaaaacaaaaacagacaacaacaacagcaattttacctggactggtgcttcaaaatataacctcaatgggcgtgaatccatcatcaaccctggcactgctatggcctcacacaaagacgacaaagacaagttctttcccatgagcggtgtcatgatttttggaaaagagagcgccggagcttcaaatactgcattggacaatgtcatgatcacagatgaagaggaaattaaagccactaaccctgtggccaccgaaagatttgggaccgtggcagtcaatttccagagcagcaacacagaccccgcgaccggagatgtgcatgttatgggagccttacctggcatggtgtggcaagacagagacgtatacctgcagggtcccatttgggccaaaattcctcacacggatggacactttcacccgtctcctctcatgggcggctttggacttaagcacccgcctcctcaaatcctcatcaaaaacacgcctgttcctgcgaatcctccggcagagttttcggctacaaagtttgcttcattcatcacccagtactccacaggacaagtgagtgtggaaattgaatgggagctgcagaaagaaaacagcaagcgctggaatcccgaagtgcagtacacatccaattatgcaaaatctgccaacgttgatttcactgtggacaacaatggactttatactgagcctcgccccattggcacccgttaccttacccgtcccttg

SEQ ID NO: 698 - DNA, 2208 bp, synthetic construct
  misc_feature 1..2208: note = Description of Artificial Sequence: Synthetic polynucleotide
  source 1..2208: mol_type = other DNA
atggctgccgatggttattttccagattggctcgaggacaacctttctgagggcattcgcgagtggtgggacttgaaacctggagccccgaaacctaaagccaaccagcaaaagcaggacgacggccggggtctggtgcttcctggctacaagtacctcggacccttcaacggactcgacaagggggagcccgtcaacgcggcggacgcagcggccctcgagcacgacaaggcctacgaccagcagctcaaagcgggtgacaatccgtacctgcggtataaccacgccgacgccgagtttcaggagcgtctgcaagaagatacgtcttttgggggcaacctcgggcgagcagtcttccaggccaagaagcgggttctcgaaccttttggtctggttgaggaaggcgctaagacggctcctggaaagaaacgtccggtagagcagtcgccacaagagccagactcctcctcgggcatcggcaggacaggccagcagcccgctaaaaagagactcaattttggtcagactggcgactcagagtcagtccccgacccacaacctctcggagaacctccagcgacccccgctgctgtgggacctactacaatggcttcaggcggtggcgcaccaatggcagacaataacgaaggtgccgacggagtgggtaatgcctcaggaaattggcattgcgattccacatggctgggcgacagagtcatcaccaccagcacccgcacctgggccttgcccacctacaataaccacctctacaagcaaatctccagtgcttcaacgggggccagcaacgacaaccactacttcggctacagcaccccctgggggtattttgatttcaacagattccactgccacttttcaccacgtgactggcagcgactcatcaacaacaattggggattccggcccaagagactcaacttcaagctcttcaacatccaagtcaaggaggtcacgacgaacgatggcgtcacgaccatcgctaataaccttaccagcacggttcaagtcttctcggattcagagtaccaactgccgtacgtcctcggctctgcgcaccagggctgcctccctccgttcccggcggacgtgttcatgattccgcagtacggctacctaacgctcaacaatggcagccaggccgtgggacgttcatccttttactgcctggaatatttcccttctcagatgctgagaacgggcaacaactttaccttcagctacacctttgaggaagtgcctttccacagcagctacgcgcacagccagagcctggaccggctgatgaatcctctcatcgaccaatacctgtattacctgaacagaactcaaaatcagtccggaagtgcccaaaacaaggacttgctgtttagccgtgggtctccagctggcatgtctgttcagcccaaaaactggctacctggaccctgttatcggcagcagcgcgtttctaaaacaaaaacagacaacaacaacagcaattttacctggactggtgcttcaaaatataacctcaatgggcgtgaatccatcatcaaccctggcactgctatggcctcacacaaagacgacgaagacaagttctttcccatgagcggtgtcatgatttttggaaaagagagcgccggagcttcaaatactgcattggacaatgtcatgatcacagatgaagaggaaattaaagccactaaccctgtggccaccgaaagatttgggaccgtggcagtcaatttccagagcagcagcccagaccccgcgaccggagatgtgcatgttatgggagccttacctggcatggtgtggcaagacagagacgtatacctgcagggtcccatttgggccaaaattcctcacacggatggacactttcacccgtctcctctcatgggcggctttggacttaagcacccgcctcctcaaatcctcatcaaaaacacgcctgttcctgcgaatcctccggcagagttttcggctacaaagtttgcttcattcatcacccagtactccacaggacaagtgagtgtggaaattgaatgggagctgcagaaagaaaacagcaagcgctggaatcccgaagtgcagtacacatccaattatgcaaaatctgccaacgttgatttcactgtggacaacaatggactttatagtgagcctcgccccattggcacccgttaccttacccgtcccttg

SEQ ID NO: 699 - DNA, 2208 bp, synthetic construct
  misc_feature 1..2208: note = Description of Artificial Sequence: Synthetic polynucleotide
  source 1..2208: mol_type = other DNA
atggctgccgatggttatcttccagattggctcgaggacaacctctctgagggcattcgcgagtggtgggacttgaaacctggagccccgaaacctaaagccaaccagcaaaagcaggacgacggccggggtctggtgcttcctggctacaagtacctcggacccttcaacggactcgacaagggggagcccgtcaacgcggcggacgcagcggccctcgagcacgacaaggcctacgaccagcagctcaaagcgggtgacaatccgtacctgcggtataaccacgccgacgccgagtttcaggagcgtctgcaagaagatacgtcttttgggggcaacctcgggcgagcagtcttccaggccaagaagcgggttctcgaaccttttggtctggttgaggaaggcgctaagacggctcctggaaagaaacgtccggtagagcagtcgccacaagagccagactcctcctcgggcatcggcaagacaggccagcagcccgctaaaaagagactcaattttggtcagactggcgactcagagtcagtccccgacccacaacctctcggagaacctccagcaacccccgctgctgtgggacctactacaatggcttcaggcggtggcgcaccaatggcagacaataacgaaggcgccgacggagtgggtaatgcctcaggaaattggcattgcgattccacatggctgggcgacagagtcatcaccaccagcacccgcacctgggccttgcccacctacaataaccacctctacaagcaaacctccagtgcttcaacgggggccagcaacgacaaccactacttcggctacagcaccccctgggggtattttgatttcaacagattccactgccacttttcaccacgtgactggcagcgactcatcaacaacaattggggattccggcccaagagactcaacttcaagctcttcaacatccaagtcaaggaggtcacgacgaacgatggcgtcacgaccatcgctaataaccttaccagcacggttcaagtcttctcggattcagagtaccaactgccgtacgtcctcggctctgcgcaccagggctgcctccctccgttcccggcggacgtgttcatgattccgcagtacggctacctaacgctcaacaatggcagccaggccgtgggacgttcatccttttactgcctggaatatttcccttctcagatgctgagaacgggcaacaactttaccttcagctacacctttgaggaagtgcctttccacagcagctacgcgcacagccagagcctggaccggctgatgaatcctctcatcgaccaatacctgtattacctgaacagaactcaaaatcagtccggaagtgcccaaaacaaggacttgctgtttagccgtgggtctccagctggcatgtctgttcagcccaaaaactggctacctggaccctgttatcggcagcagcgcgtttctaaaacaaaaacagactacaacaacagcaattttacctggactggtgcttcaaaatataacctcaatgggcgtgaatccatcatcaaccctggcactgctatggcctcacacaaagacgacgaagacaagttctttcccatgagcggtgtcatgatttttggaaaagagagcgccggagcttcaaatactgcattggacaatgtcatgatcacagatgaagaggaaattaaagccactaaccctgtggccaccgaaagatttgggaccgtggcagtcaatttccagagcagcagcacagaccccgcgaccggagatgtgcatgttatgggagccttacctggcatggtgtggcaagacagagacgtatacctgcagggtcccatttgggccaaaattcctcacacggatggacactttcacccgtctcctctcatgggcggctttggacttaagcacccgcctcctcaaatcctcatcaaaaacacgcctgttcctgcgaatcctccggcagagttttcggctacaaagtttgcttcattcatcacccagtactccacaggacaagtgagtgtggaaattgaatgggagctgcagaaagaaaacagcaagcgctggaatcccgaagtgcagtacacatccaattatgcaaaatctgccaacgttgatttcactgtggacaacaatggactttatactgagcctcgccccattggcacccgttaccttacccgtcccttg

SEQ ID NO: 700 - DNA, 2208 bp, synthetic construct
  misc_feature 1..2208: note = Description of Artificial Sequence: Synthetic polynucleotide
  source 1..2208: mol_type = other DNA
atggctgccgatggttatcctccagattggctcgaggacaacctctctgagggcattcgcgagtggtgggacttgaaacctggagtcccgaaacctaaagccaaccagcaaaagcaggacgacggccggggtctggtgcttcctggctacaagtacctcggacccttcaacggactcgacaagggggagcccgtcaacgcggcggacgcagcggccctcgagcacgacaaggcctacgaccagcagctcaaagcgggtgacaatccgtacctgcggtataaccacgccgacgccgagtttcaggagcgtctgcaagaagatacgtcttttgggggcaacctcgggcgagcagtcttccaggccaagaagcgggttctcgaaccttttggtctggttgaggaaggcgctaagacggctcctggaaagaaacgtccggtagagcagtcgccacaagagccagactcctcctcgggcatcggcaagacaggccagcagcccgctaaaaagagactcaattttggtcagactggcgactcagagtcagtccccgacccacaacctctcggagaacctccagcaacccccgctgctgtgggacctactacaatggcttcaggcggtggcgcaccaatggcagacaataacgaaggcgccgacggagtgggtaatgcctcaggaaattggcattgcgattccacatggctgggcgacagagtcatcaccaccagcacccgcacctgggccttgcccacctacaataaccacctctacaagcaaatctccagtgcttcaacgggggccagcaacgacaaccactacttcggctacagcaccccctgggggtattttgatttcaacagattccactgccacttttcaccacgtgactggcagcgactcatcaacaacaattggggattccggcccaagagactcaacttcaagctcttcaacatccaagtcaaggaggtcacgacgaacgatggcgtcacgaccatcgctaataaccttaccagcacggttcaagtcttctcggattcagagtaccaactgccgtacgtcctcggctctgcgcaccagggctgcctccctccgttcccggcggacgtgttcatgattccgcagtacggctacctaacgctcaacaatggcagccaggccgtgggacgttcatccttttactgcctggaatatttcccttctcagatgctgagaacgggcaacaactttaccttcagctacacctttgaggaagtgcctttccacagcagctacgcgcacagccagagcctggaccggctgatgaatcctctcatcgaccaatacctgtattacctgaacagaactcaaaatcagtccggaagtgcccaaaacaaggacttgctgtttagccgtgggtctccagctggcatgtctgttcagcccaaaaactggctacctggaccctgttatcggcagcagcgcgtttctaaaacaaaaacagacaacaacaacagcaattttacctggactggtgcttcaaaatataacctcaatgggcgtgaatccatcatcaaccctggcactgctatggcctcacacaaagacgacgaagacaagttctttcccatgagcggtgtcatgatttttggaaaagagagcgccggagcttcaaatactgcattggacaatgtcatgatcacagatgaagaggaaattaaagccactaaccctgtggccaccgaaagatttgggaccgtggcagtcaatttccagagcagcagcacagaccccgcgaccggagatgtgcatgttatgggagccttacctggcatggtgtggcaagacagagacgtatacctgcagggtcccatttgggccaaaattcctcacacggatggacactttcacccgtctcctctcatgggcggctttggacttaagcacccgcctcctcaaatcctcatcaaaaacacgcctgttcctgcgaatcctccggcagagttttcggctacaaagtttgcttcattcatcacccagtactccacaggacaagtgagtgtggaaattgaatgggagctgcagaaagaaaacagcaagcgctggaatcccgaagtgcagtacacatccaattatgcaaaatctgccaacgttgatttcactgtggacaacaatggactttatactgagcctcgccccattggcacccgttaccttacccgtcccttg

SEQ ID NO: 701 - DNA, 2196 bp, synthetic construct
  misc_feature 1..2196: note = Description of Artificial Sequence: Synthetic polynucleotide
  source 1..2196: mol_type = other DNA
atggctgccgatggttatcttccagattggctcgaggacaacctctctgagggcattcgcgagtggtgggacttgaaacctggagccccgaaacctaaagccaaccagcaaaagcaggacgacggccggggtctggtgcttcctggctacaagtacctcggacccttcaacggactcgacaagggggagcccgtcaacgcggcggacgcagcggccctcgagcacgacaaggcctacgaccagcagctcaaagcgggtgacaatccgtacctgcggtataaccacgccgacgccgagtttcaggagcgtctgcaagaagatacgtcttttgggggcaacctcgggcgagcagtcttccaggccaagaagcgggttctcgaaccttttggtctggttgaggaaggcgctaagacggctcctggaaagaaacgtccggtagagcagtcgccacaagagccagactcctcctcgggcatcggcaagacaggccagcagcccgctaaaaagagactcaattttggtcagactggcgactcagagtcagtccccgacccacaacctctcggagaacctccagcaacccccgctgctgtgggacctactacaatggcttcaggcggtggcgcaccaatggcagacaataacgaaggcgccgacggagtgggtaatgcctcaggaaattggcattgcgattccacatggctgggcgacagagtcatcaccaccagcacccgcacctgggccttgcccacctacaataaccacctctacaagcaaatctccagtgcttcaacgggggccagcaacgacaaccactacttcggctacagcaccccctgggggtattttgatttcaacagattccactgccacttttcaccacgtgactggcagcgactcatcaacaacaattggggattccggcccaagagactcaacttcaagctcttcaacatccaagtcaaggaggtcacgacgaacgatggcgtcacgaccatcgctaataaccttaccagcacggttcaagccttctcggattcagagtaccaactgccgtacgtcctcggctctgcgcaccagggctgcctccctccgttcccggcggacgtgttcatgattccgcagtacggctacctaacgctcaacaatggcagccaggccgtgggacgttcatccttttactgcctggaatatttcccttctcagatgctgagaacgggcaacaactttaccttcagctacacctttgaggaagtgcctttccacagcagctacgcgcacagccagagcctggaccggctgatgaatcctctcatcgacccatacctgtattacctgaacagaactcaaaatcagtccggaagtgcccaaaacaaggacttgctgtttagccgtgggtctccagctggcatgtctgttcagcccaaaaactggctacctggaccctgttatcggcagcagcgcgtttctaaaacaaaaacagacaacaacaacagcaattttacctggactggtgcttcaaaatataacctcaatgggcgtgaatccatcatcaaccctggcactgctatggcctcacacaaagacgacgaagacaagttctttcccatgagcggtgtcatgatttttggaaaagagagcgccggagcttcaaatactgcattggacaatgtcatgatcacagatgaagaggaaattaaagccactaaccctgtggccaccgaaagatttgggaccgtggcagtcaatttccagagcagcagcacagaccccgcgaccggagatgtgcatgttatgggagccttacctggcatggtgtggcaagacagagacgtatacctgcagggtcccatttgggccaaaattcctcacacggatggacactttcacccgtctcctctcatgggcggctttggacttaagcacccgcctcctcaaatcctcatcaaaaacacgcctgttcctgcgaatcctccggcagagttttcggctacaaagtttgcttcattcatcacccagtactccacaggacaagtgagtgtggaaattgaatgggagctgcagaaagaaaacagcaagcgctggaatcccgaagtgcagtacacatccaattatgcaaaatctgccaacgttgatttcactgtggacaacaatggactttatactgagcctcgccccattggcacccgttacctt

SEQ ID NO: 702 - DNA, 2208 bp, synthetic construct
  misc_feature 1..2208: note = Description of Artificial Sequence: Synthetic polynucleotide
  source 1..2208: mol_type = other DNA
atggctgccgatggttatcttccagattggctcgaggacaacctctctgagggcattcgcgagtggtgggacttgaaacctggagccccgaaacctaaagccaaccagcaaaagcaggacgacggccggggtctggtgcttcctggctacaagtacctcggacccttcaacggactcgacaagggggagcccgtcaacgcggcggacgcagcggccctcgagcacgacaaggcctacgaccagcagctcaaagcgggtgacaatccgtacctgcggtataaccacgccgacgccgagtttcaggagcgtctgcaagaagatacgtcttttgggggcaacctcgggcgagcagtcttccaggccaagaagcgggttctcgaaccttttggtctggttgaggaaggcgctaagacggctcctggaaagaaacgtccggtagagcagtcgccacaagagccagactcctcctcgggcatcggcaagacaggccagcagcccgctaaaaagagactcaattttggtcagactggcgactcagagtcagtccccgacccacaacctctcggagaacctccagcaacccccgctgctgtgggacctactacaatggcttcaggcggtggcgcaccaatggcagacaataacgaaggcgccgacggagtgggtaatgcctcaggaaattggcattgcgattccacatggctgggcgacagagtcatcaccaccagcacccgcacctgggccttgcccacctacaataaccacctctacaagcaaatctccagtgcttcaacgggggccagcaacgacaaccactacttcggctacagcaccccctgggggtattttgatttcaacagattccactgccacttttcaccacgtgactggcagcgactcatcaacaacaattggggattccggcccaagagactcaacttcaagctcttcaacatccaagtcaaggaggtcacgacgaacgatggcgtcacgaccatcgctaataaccttaccagcacggttcaagtcttctcggattcagagtaccaactgccgtacgtcctcggctctgcgcaccagggctgcctccctccgttcccggcggacgtgttcatgattccgcagtacggctacctaacgctcaacaatggcagccaggccgtgggacgttcatccttttactgcctggaatatttcccttctcagatgctgagaacgggcaacaactttaccttcagctacacctttgaggaagtgcctttccacagcagctacgcgcacagccagagcctggaccggctgatgaatcctctcatcgaccaatacctgtattacctgaacagaactcaaaatcagtccggaagtgcccaaaacaaggacttgctgtttagccgtgggtctccagctggcatgtctgttcagcccaaaaactggctacctggaccctgttatcggcagcagcgcgtttctaaaacaaaaacagacaacaacaacagcaattttacctggactggtgcttcaaaatataacctcaatgggcgtgaatccatcatcaaccctggcactgctatggcctcacacaaagacgacgaagacaagttctttcccatgagcggtgtcatgatttttggaaaagagagcgccggagcttcaaatactgcattggacaatgtcatgatcacagatgaagaggaaattaaagccactaaccctgtggccaccgaaagatttgggaccgtggcagtcaatttccagagcagcagcacagaccccgcgaccggagatgtgcatgttatgggagccttacctggcatggtgtggcaagacagagacgtatacctgcagggtcccatttgggccaaaattcctcacacggatggacactctcacccgtctcctctcatgggcggctttggacttaagcacccgcctcctcaaatcctcatcaaaaacacgcctgttcctgcgaatcctccggcagagttttcggctacaaagtttgcttcattcatcacccagtactccacaggacaagtgagtgtggaaattgaatgggagctgcagaaagaaaacagcaagcgctggaatcccgaagtgcagtacacatccaattatgcaaaatctgccaacgttgatttcactgtggacaacaatggactttatactgagcctcgccccattggcacccgttaccttacccgtcccttg

SEQ ID NO: 703 - DNA, 2208 bp, synthetic construct
  misc_feature 1..2208: note = Description of Artificial Sequence: Synthetic polynucleotide
  source 1..2208: mol_type = other DNA
atggctgccgatggttatcttccagattggctcgaggacaacctctctgagggcattcgcgagtggtgggacttgaaacctggagccccgaaacctaaagccaaccagcaaaagcaggacgacggccggggtctggtgcttcctggctacaagtacctcggacccttcaacggactcgacaagggggagcccgtcaacgcggcggacgcagcggccctcgagcacgacaaggcctacgaccagcagctcaaagcgggtgacaatccgtacctgcggtataaccacgccgacgccgagtttcaggagcgtctgcaagaagatacgtcttttgggggcaacctcgggcgagcagtcttccaggccaagaagcgggttctcgaaccttttggtctggttgaggaaggcgctaagacggctcctggaaagaaacgtccggtagagcagtcgccacaagagccagactcctcctcgggcatcggcaagacaggccagcagcccgctaaaaagagactcaattttggtcagactggcgactcagagtcagtccccgacccacaacctctcggagaacctccagcaacccccgctgctgtgggacctactacaatggcttcaggcggtggcgcaccaatggcagacaataacgaaggcgccgacggagtgggtaatgcctcaggaaattggcattgcgattccacatggctgggcgacagagtcatcaccaccagcacccgcacctgggccttgcccacctacaataaccacctctacaagcaaatctccagtgcttcaacgggggccagcaacgacaaccactacttcggctacagcaccccctgggggtattttgatttcaacagattccactgccacttttcaccacgtgactggcagcgactcatcaacaacaattggggattccggcccaagagactcaacttcaagctcttcaacatccaagtcaaggaggtcacgacgaacgatggcgtcacgaccatcgctaataaccttaccagcacggttcaagtcttctcggattcagagtaccaactgccgtacgtcctcggctctgcgcaccagggctgcctccctccgttcccggcggacgtgttcatgattccgcagtacggctacctaacgctcaacaatggcagccaggccgtgggacgttcatccttttactgcctggaatatttcccttctcagatgctgagaacgggcaacaactttaccttcagctacacctttgaggaagtgcctttccacagcagctacgcgcacagccagagcctggaccggctgatgaatcctctcatcgacctatacctgtattacctgaacagaactcaaaatcagtccggaagtgcccaaaacaaggacttgctgtttagccgtgggtctccagctggcatgtctgttcagcccaaaaactggctacctggaccctgttatcggcagcagcgcgtttctaaaacaaaaacagacaacaacaacagcaattttacctggactggtgcttcaaaatataacctcaatgggcgtgaatccatcatcaaccctggcactgctatggcctcacacaaagacgacgaagacaagttctttcccatgagcggtgtcatgatttttggaaaagagagcgccggaacttcaaatactgcattggacaatgtcatgatcacagatgaagaggaaattaaagccactaaccctgtggccaccgaaagatttgggaccgtggcagtcaatttccagagcagcagcacagaccccgcgaccggagatgtgcatgttatgggagccttacctggcatggtgtggcaagacagagacgtatacctgcagggtcccatttgggccaaaattcctcacacggatggacactttcacccgtctcctctcatgggcggctttggacttaagcacccgcctcctcaaatcctcatcaaaaacacgcctgttcctgcgaatcctccggcagagttttcggctacaaagtttgcttcattcatcacccagtactccacaggacaagtgagtgtggaaattgaatgggagctgcagaaagaaaacagcaagcgctggaatcccgaagtgcagtacacatccaattatgcaaaatctgccaacgttgatttcactgtggacaacaatggactttatactgagcctcgccccattggcacccgttaccttacccgtcccttg

SEQ ID NO: 704 - DNA, 2208 bp, synthetic construct
  misc_feature 1..2208: note = Description of Artificial Sequence: Synthetic polynucleotide
  source 1..2208: mol_type = other DNA
atggctgccgatggttatcttccagattggctcgaggacagcctctctgagggcattcgcgagtggtgggacttgaaacctggagccccgaaacctaaagccaaccagcaaaagcaggacgacggccggggtctggtgcttcctggctacaagtacctcggacccttcaacggactcgacaagggggagcccgtcaacgcggcggacgcagcggccctcgagcacgacaaggcctacgaccagcagctcaaagcgggtgacaatccgtacctgcggtataaccacgccgacgccgagtttcaggagcgtctgcaagaagatacgtcttttgggggcaacctcgggcgagcagtcttccaggccaagaagcgggttctcgaaccttttggtctggttgaggaaggcgctaagacggctcctggaaagaaacgtccggtagagcagtcgccacaagagccagactcctcctcgggcatcggcaagacaggccagcagcccgctaaaaagagactcaattttggtcagactggcgactcagagtcagtccccgacccacaacctctcggagaacctccagcaacccccgctgctgtgggacctactacgatggcttcaggcggtggcgcaccaatggcagacaataacgaaggcgccgacggagtgggtaatgcctcaggaaattggcattgcgattccacatggctgggcgacagagtcatcaccaccagcacccgcacctgggccttgcccacctacaataaccacctctacaagcaaatctccagtgcttcaacgggggccagcaacgacaaccactacttcggctacagcaccccctgggggtattttgatttcaacagattccactgccacttttcaccacgtgactggcagcgactcatcaacaacaattggggattccggcccaagagactcaacttcaagctcttcaacatccaagtcaaggaggtcacgacgaacgatggcgtcacgaccatcgctaataaccttaccagcacggttcaagtcttctcggattcagagtaccaactgccgtacgtcctcggctctgcgcaccagggctgcctccctccgttcccggcggacgtgttcatgattccgcagtacggctacctaacgcccaacaatggcagccaggccgtgggacgttcatccttttactgcctggaatatttcccttctcagatgctgagaacgggcaacaactttaccttcagctacacctttgaggaagtgcctttccacagcagctacgcgcacagccagagcctggaccggctgatgaatcctctcatcgaccaataccagtattacctgaacagaactcaaaatcagtccggaagtgcccaaaacaaggacttgctgtttagccgtgggtctccagctggcatgtctgttcagcccaaaaactggctacctggaccctgttatcggcagcagcgcgtttctaaaacaaaaacagacaacaacaacagcaattttacctggactggtgcttcaaaatataacctcaatgggcgtgaatccatcatcaaccctggcactgctatggcctcacacaaagacgacgaagacaagttctttcccatgagcggtgtcatgatttttggaaaagagagcgccggagcttcaaatactgcattggacaatgtcatgatcacagatgaagaggaaattaaagccactaaccctgtggccaccgaaagatttgggaccgtggcagtcaatttccagagcagcagcacagaccccgcgaccggagatgtgcatgttatgggagccttacctggcatggtgtggcaagacagagacgtatacctgcagggtcccatttgggccaaaattcctcacacggatggacactttcacccgtctcctctcatgggcggctttggacttaagcacccgcctcctcaaatcctcatcaaaaacacgcctgttcctgcgaatcctccggcagagttttcggctacaaagtttgcttcattcatcacccagtactccacaggacaagtgagtgtggaaattgaatgggagctgcagaaagaaaacagcaagcgctggaatcccgaagtgcagtacacatccaattatgcaaaatctgccaacgttgatttcactgtggacaacaatggactttatactgagcctcgccccattggcacccgttaccttacccgtcccttg

SEQ ID NO: 705 - DNA, 2208 bp, synthetic construct; identical to SEQ ID NO: 696
  misc_feature 1..2208: note = Description of Artificial Sequence: Synthetic polynucleotide
  source 1..2208: mol_type = other DNA

SEQ ID NO: 706 - DNA, 2205 bp, synthetic construct
  misc_feature 1..2205: note = Description of Artificial Sequence: Synthetic polynucleotide
  source 1..2205: mol_type = other DNA
atggctgccgatggttatcttccagattggctcgaggacactctctctgaaggaataagacagtggtggaagctcaaacctggcccaccaccaccaaagcccgcagagcggcataaggacgacagcaggggtcttgtgcttcctgggtacaagtacctcggacccttcaacggactcgacaagggagagccggtcaacgaggcagacgccgcggccctcgagcacgacaaagcctacgaccggcagctcgacagcggagacaacccgtacctcaagtacaaccacgccgacgcggagtttcaggagcgccttaaagaagatacgtcttttgggggcaacctcggacgagcagtcttccaggcgaaaaagagggttcttgaacctctgggcctggttgaggaacctgttaagacggctccgggaaaaaagaggccggtagagcactctcctgtggagccagactcctcctcgggaaccggaaaggcgggccagcagcctgcaagaaaaagattgaattttggtcagactggagacgcagactcagtacctgacccccagcctctcggacagccaccagcagccccctctggtctgggaactaatacgatggctacaggcagtggcgcaccaatggcagacaataacgagggcgccgacggagtgggtaattcctcgggaaattggcattgcgattccacatggatgggcgacagagtcatcaccaccagcacccgaacctgggccctgcccacctacaacaaccacctctacaaacaaatttccagccaatcaggagcctcgaacgacaatcactactttggctacagcaccccttgggggtattttgacttcaacagattccactgccacttttcaccacgtgactggcaaagactcatcaacaacaactggggattccgacccaagagactcaacttcaagctctttaacattcaagtcaaagaggtcacgcagaatgacggtacgacgacgattgccaataaccttaccagcacggttcaggtgtttactgactcggagtaccagctcccgtacgtcctcggctcggcgcatcaaggatgcctcccgccgttcccagcagacgtcttcatggtgccacagtatggatacctcaccctgaacaacgggagtcaggcagtaggacgctcttcattttactgcctggagtactttccttctcagatgctgcgtaccggaaacaactttaccttcagctacacttttgaggacgttcctttccacagcagctacgctcacagccagagtctggaccgtctcatgaatcctctcatcgaccagtacctgtattacttgagcagaacaaacactccaagtggaaccaccacgcagtcaaggcttcagttttctcgggccggagcgagtgacattcgggaccagtctaggaactggcttcctggaccctgttaccgccagcagcgagtatcaaagacatctgcggataacaacaacagtgaatactcgtggactggagctaccaagtaccacctcaatggcagagactctctggtgaatccgggcccggccatggcaagccacaaggacgatgaagaaaagttttttcctcagagcggggttctcatctttgggaagcaaggctcagagaaaacaaatgtggacattgaaaaggtcatgattacagacgaagaggaaatcaggacaaccaatcccgtggctacggagcagtatggttctgtatctaccaacctccagagaggcaacagacaagcagctaccgcagatgtcaacacacaaggcgttcttccaggcatggtctggcaggacagagatgtgtaccttcaggggcccatctgggcaaagattccacacacggacggacattttcacccctctcccctcatgggtggattcggacttaaacaccctcctccacagattctcatcaagaacaccccggtacctgcgaatccttcgaccaccttcagtgcggcaaagtttgcttccttcatcacacagtactccacgggacaggtcagcgtggagatcgagtgggagctgcagaaggaaaacagcaaacgctggaatcccgaaattcagtacacttccaactacaacaagtctgttaatgtggactttactgtggacactaatggcgtgtattcagagcctcgccccattggcaccagatacctgactcgtaatctg

SEQ ID NO: 707 - protein, 736 aa, synthetic construct
  REGION 1..736: note = Description of Artificial Sequence: Synthetic polypeptide
MAADGYLPDWLEDNLSEGIREWWALKPGAPQPKANQQHQDNARGLVLPDYKYLGPGNGLDKGEPVNAADVAALEHDKAYDQQLKAGDNPYLKYNHADAEFQERLKEDTSFGGNLGRAVFQAKKRLLEPLGLVEEAAKTAPGKKRPVEQSPQEPDSSAGIGKSGAQPAKKRLNFGQTGDTESVPDPQPIGEPPAAPSGVGSLTMASGGGAPVADNNEGADGVGSSSGNWHCDSQWLGDGVITTSTRTWALPTYNNHLYKQISNSTSGGSSNDNAYFGYSTPWGYFDFNRFHCHFSPRDWQRLINNNWGFRPKRLNFKLFNIQVKEVTDNNGVKTIANNLTSTVQVFTDSDYQLPYVLGSAHEGCLPPFPADVFMIPQYGYLTLNDGSQAVGRSSFYCLEYFPSQMLRTGNNFQFSYEFENVPFHSSYAHSQSLDRLMNPLIDQYLHYLPKTINGSGQNQQTLKFSVAGPSNMAVQGRNYIPGPSYRQQRVSTTVTQNNNSEFAWPGASSWALNGRNSLMNPGPAMASYKEGEDSFFPLSGSLIFGKQGTGRDNVDADKVMITNEEEIKTTNPVATESYGQVATNHQSAQAQAQTGWVQNQGILPGMVWQDRDVYLQGPIWAKIPHTDGNFHPSPLMGGFGMKHPPPQTLIKNTPVPADPPTAFNKDKLNSFITQYSTGQVSVEIEWELQKENSKRWNPEIQYTSNYYKSNNVEFAVNTEGVYSEPRPIGTRYLTRNL

SEQ ID NO: 708 - protein, 736 aa, synthetic construct
  REGION 1..736: note = Description of Artificial Sequence: Synthetic polypeptide
MAADGYLPDWLEDNLSEGIREWWALKPGAPQPKANQQHQDNARGLVLPGYKYLGPGNGLDKGEPVNAADAAALEHDKAYDQQLKAGDNPYLKYNHADAEFQERLKEDTSFGGNLGRAVFQAKRRLLEPLGLVEEAAKTAPGKKRPVEQSPQEPDSSAGIGKSGAQPAKKRLNFGQTGDTESVPDPQPIGEPPAAPSGVGSLTMASGGGAPVADNNEGADGVGSSSGNWHCDSQWLGDRVITTSTRTWALPTYNNHLYKQISNSTSGGSSNDNAYFGYSTPWGYFDFNRFHCHFSPRDWQRLINNNWGFRPKRLNFKLFNIQIKEVTDNNGVKTIANNLTSTVQVFTDLDYQLPYVLGSAHEGCLPPFPADVFMIPQYGYLTLNDGSQAVGRSSFYCLEYFPSQMLRTGNNFQFSYEFENVPFHSSYAHSQSLDRLMNPLIDQYLHYLSKTINGSGQNQQTLKFSVAGPSNMAVQGRNYIPGPSYRQQRVSTTVTQNNNSEFAWPGASSWALNGRNSLMNPGPAMASYKEGEDSFFPLSGSLIFGKQGTGRDNVDADKVMITNEEEIKTTNPVATESYGQVATNHQSAQAQAQTGWVQNQGILPGMVWQDRDVYLQGPIWAKIPHTDGNFHPSPLMGGFGMKHPPPQTLIKNTPVPADPPTAFNKDKLNSFITQYSTGQVSVEIEWELQKENSKRWNPEIQYTSNYYKSNNVEFAVNTEGVYSEPRPIGTRYLTRNL

SEQ ID NO: 709 - protein, 736 aa, synthetic construct
  REGION 1..736: note = Description of Artificial Sequence: Synthetic polypeptide
MAADGYLPDWLEDNLSEGIREWWALKPGAPQPKANQQHQDNARGLVLPGYKYLGPGNGLDKGEPVSAADAAALEHDKAYDQQLKAGDNPYLKYNHADAEFQERLKEDTSFGGNLGRAVFQAKKRLLEPLGLVEEAAKTAPGKKRPVEQSPQEPDSSAGIGKSGAQPAKKRLNFGQTGDTESVSDPQPIGEPPAAPSGVGSLTMASGGGAPVADNNEGADGVGSSSGNWHCDSQWLGDRVITTSTRTWALPTYNNHLYKQISNSTSGGSSNDNAYFGYSTPWGYFDFNRFHCHFSPRDWQRLINNNWGFRPKRLNFKLFNIQVKEVTDNNGVKTIANNLTSTVQVFTDSDYQLPYVLGSAHEGCLPPSPADVFMIPQYGYLTLNDGSQAVGRSSFYCLEYFPSQMLRTGNNFQFSYEFENVPFHSSYAHSQSLDRLMNPLIDQYLHYLSKTINGSGQNQQTLKFSVAGPSNMAVQGRNYIPGPSYRQQRVSTTVTQNNNSEFAWPGASSWALNGRNSLMNPGPAMASYKEGEDSFFPLSGSLIFGKQGTGRDDVDADKVIITNEEEIKTTNPVATESYGQVATNHQSAQAQAQTGWVQNQGILPGMVWQDRDVYLQGPIWAKIPHTDGNFHPSPLMGGFGMKHPPPQTLIKNTPVPADPPTAFNKDKLNSFITQYSTGQVSVEIEWELQKENSKRWNPEIQYTSNYYKSNNVEFAVNTEGVYSEPRPIGTRYLTRNL

SEQ ID NO: 710 - protein, 736 aa, synthetic construct
  REGION 1..736: note = Description of Artificial Sequence: Synthetic polypeptide
MAADGYLPDWLEDNLSEGIREWWALKPGAPQPKANQQHQDNARGLVLPGYKYLGPGNGLDKGEPVNAADAAALEHDKAYDQQLKAGDNPYLKYNHAGAEFQERLKEDTSFGGNLGRAVFQAKKRLLEPLGLVEEAAKTAPGKKRPVEQSPQEPDSSAGIGKSGAQPAKKRLNFGQTGDTESVPDPQPIGEPPAAPSGVGSLTMASGGGAPVADNNEGAGGVGSSSGNWHCDSQWLGDRVVTTSTRTWALPTYNNHLYKQISNSTSGGSSNDNAYFGYSTPWGYFDFNRFHCHFSPRDWQRLINNNWGFRPKRLNFKLFNIQVKEVTDNNGVKTIANNLTSTVQVFTDSDYQLPYVLGSAHGGCLPPFPADVFMIPQYGYLTLNDGSQAVGRSSFYCLEYFPSQMLRTGNNFQFSYEFENVPFHSSYAHSQSLDRLMNPLIDQYLHYLSKTINGSGQNQQTLKFSVAGPSNMAVQGRSYIPGPSYRQQRVSTTVTQNNNSEFAWPGASSWALNGRNSLMNPGPAMASYKEGEDSFFPLSGSLIFGKQGTGRDNVDADKVMITNEEEIKTTNPVATESYGQVATNHQSAQAQAQTGWVQNQGILPGMVWQDRDVYLQGPIWAKIPHTDGNFHPSPLMGGFGMKHPPPQTLIKNTPVPADPPTAFNKDKLNSFITQYSTGQVSVEIEWELQKENSKRWNPEIQYTSNYYKSNNVEFAVNTEGVYSEPRPIGTRYLTRNL

SEQ ID NO: 711 - protein, 736 aa, synthetic construct
  REGION 1..736: note = Description of Artificial Sequence: Synthetic polypeptide
MAADGYLPDWLEDNLSEGIREWWALKPGAPQPKANQQHQDNARGLVLPGYKYLGPGNGLDKGEPVNAADAAALEHDKAYDQQLKAGDNPYLKYNHADAEFQERLKEDTSFGGNLGRAVFQAKKRLLEPLGLVEEAAKTAPGKKRPVEQSPQEPDSSAGIGKSGAQPAKKRLNFGQTGDTESVPDPQPIGEPPAAPSGVGSLTMASGGGAPVADNNEGADGVGSSSGNWHCDSQWLGDRVVTTSTRTWALPTYNNHLYKQISNSTSGGSSNDNAYFGYSTPWGYFDFNRFHCHFSPRDWQRLINNNWGFRPKRLNFKLFNIQVKEVTDNNGVKTIANNLTSTVQVFTDSDYQLPYVLGSAHEGCLPPFPADVFMIPQYGYLTLNDGSQAVGRSSFYCLEYFPSQMLRTGNNFQFSYEFENVPFHSSHAHSQSLDRLMNPLIDQYLHYLSKTINGSGQNQQTLKFSVAGHSNMAVQGRNYIPGPSYRQQRVSTTVTQNNNSEFAWPGASSWALNGRNSLMNPGPAMASYKEGEDSFFPLSGSLIFGKQGTGRDNVDADKVMITNEEEIKTTNPVATESYGQVATNHQSAQAQAQTGWVQNQGILPGMVWQDRDVYLQGPIWAKIPHTDGNFHPSPLMGGFGMKHPPPQTLIKNTPVPADPPTAFNKDKLNSFITQYSTGQVSVEIGWELQKENSKRWNPEIQYTSNYYKSNNVEFAVNTEGVYSEPRPIGTRYLTRNL

SEQ ID NO: 712 - protein, 736 aa, synthetic construct
  REGION 1..736: note = Description of Artificial Sequence: Synthetic polypeptide
MAADGYLPDWLEDNLSEGIREWWALKPGAPQPKANQQHQDNARGLVLPGYKYLGPGNGLDKGEPVNAADAAALEHDKAYDQQLKAGDNPYLKYNHADAEFQERLKEDTSFGGNLGRAVFQAKKRLLEPLGLVEEAAKTAPGKKRPVEQSPQEPDSSAGIGKSGAQPAKKRLNFGQTGDTESVPDPQPIGEPPAAPSGVGSLTMASGGGAPVADNNEGADGVGSSSGNWHCDSQWLGDRVITTSTRTWALPTYNNRLYKQISNSTSGGSSNDNAYFGYSTPWGYFDFNRFHCHFSPRDWQRLINNNWGFRPKRLNFKPFNIQVKEVTDNNGVKTIANNLTSTVQVFTDSDYQLPYVLGSAHEGCLPPFPADVFMIPQYGYLTLNDGSQAVGRSSFYCLEYFPSQMLRTGNNFQFSYEFENVPFHSSYAHSQSLDRLMNPLIDQYLHYLSKTINGSGQNQQTLKFSVAGPSNMAVQGRNYIPGPSYRQQRVSTTVTQNNNSEFAWPGASSWALNGRNSLMNPGPAMASYKEGEDSFFPLSGSLIFGKQGTGRDNVDADKVMITNEEEIKTTNPVATESYGQVATNHQSAQAQAQTGWVQNQGILPGMVWQDRDVYLQGPIWAKIPHTDGNFHPSPLMGGFGMKHPPPQTLIKNTPVPADPPTAFNKDKLNSFITQYSTGQVSVEIEWELQKENSKRWNPEIQYTSNYYKSNNVEFAVNTEGVYSEPRPIGTRYLTRNL

SEQ ID NO: 713 - protein, 736 aa, synthetic construct
  REGION 1..736: note = Description of Artificial Sequence: Synthetic polypeptide
MAADGYLPDWLEDNLSEGIREWWALKPGAPQPKANQQHQDNARGLVLPGYKYLGPGNGLDKGEPVNAADAAALEHDKAYDQQLKAGDNPYLKYNHADAEFQERLKEDTSFGGNLGRAVFQAKKRLLEPLGLVEEAAKTAPGKKRPVEQSPQEPDSSAGIGKSGAQPAKKRLNFGQTGDTESVPDPQPIGEPPAAPSGVGSLTMASGGGAPVADNNEGADGVGSSSGNWHCDSQWLGDRVITTSTRTWALPTYNNHLYKQISNSTSGGSSNDNAYFGYSTPWGYFDFNRFHCHFSPRDWQRLINNNWGFRPKRLNFKLFNIQVKEVTDNNGVKTIANNLTSTVQVFTDSDYQLPYVLGSAHEGCLPPFPADVFMIPQYGYLTLNDGSQAVGRSSFYCLEYFPSQMLRTGNNFQFSYEFENVPFHSSYAHSQSLDRLMNPLIDQYLHYLSKTINGSGQNQQTLKFSVAGPSNMAVQGRNYIPGPSYRQQRVSTTVTQNNNSEFAWPGASSWALNGRNSLMNPGPAMASYKEGEDSFFPLSGSLIFGKQGTGRDNVDADKVMITNEEEIKTTNPVATESYGQVATNHQSAQAQAQTGWVQNQGILPGMVWQDRDVYLQGPIWAKIPHTDGNFHPSPLMGGFGMKHPPPQTLIKNTPVPADPPTAFNKDKLNSFITQYSTGQVSVEIEWELQKENSKRWNPEIQYTSNYYKSNNVEFAVNTEGVYSEPRPIGTRYLTRNL

SEQ ID NO: 714 - protein, 736 aa, synthetic construct; identical to SEQ ID NO: 713
  REGION 1..736: note = Description of Artificial Sequence: Synthetic polypeptide

SEQ ID NO: 715 - protein, 736 aa, synthetic construct
  REGION 1..736: note = Description of Artificial Sequence: Synthetic polypeptide
MAADGYLPDWLEDNLSEGIREWWDLKPGAPKPKANQQKQDDGRGLVLPGYKYLGPFNGLDKGEPVNAADAAALEHDKAYDQQLKAGDNPYLRYNHADAEFQERLQEDTSFGGNLGRAVFQAKKRVLEPFGLVEEGAKTAPGKKRPVEQSPQEPDSSSGIGKSGQQPAKKRLNFGQTGDSESVPDPQPLGEPPATPAALGPTTMASGGGAPMADNNEGADGVGNASGNWHCDSTWLGDRVITTSTRTWALPTYNNHLYKQISSASTGASNDNHYFGYSTPWGYFDFNRFHCHFSPRDWQRLINNNWGFRPKRLNFKLFNIQVKEVTTNDGVTTIANNLTSTVQVFSDSEYQLPYVLGSAHQGCLPPFPADVFMIPQYGYLTLNNGSKAVGRSSFYCLEYFPSQMLRTGNNFTFSYTFEEVPFHSSYAHSQSLDRLMNPLIDQYLYYLNRTQNQSGSAQNKDLLFSRGSPAGMSVQPKNWLPGPCYRQQRVSKTKTDNNNSNFTWTGASKYNLNGRESIINPGTAMASHKDDEDKFFPMSGVMIFGKESAGASNTALDNVMITDEEEIKATNPVATERFGTVAVNFQSSSTDPATGDVHVMGALPGMVWQDRDVYLQGPIWAKIPHTDGHFHPSPLMGGFGLKHPPPQILIKNTPVPANPPAEFSATKFASFITQYSTGQVSVEIEWELQKENSKRWNPEVQYTSNYAKSANVDFTVDNNGLYTEPRPIGTRYLTRPL

SEQ ID NO: 716 - protein, 736 aa, synthetic construct
  REGION 1..736: note = Description of Artificial Sequence: Synthetic polypeptide
MAADGYLPDWLEDNLSEGIREWWDLKPGAPKPKANQQKQDDGRGLVLPGYKYLGPFNGLDKGEPVNAADAAALEHDKAYDQQLKAGDNPYLRYNHADAEFQERLQEDTSFGGNLGRAVFQAKKRVLEPLGLVEEGAKTAPGKKRPVEQSPQEPDSSSGIGKTGQQPAKKRLNFGQTGDSESVPDPQPLGEPPATPAAVGPTTMASGGGAPMADNNEGADGVGNASGNWHCDSTWLGDRVITTSTRTWALPTYNNHLYKQISSTSTGASNDNHYFGYSTPWGYFDFNRFHCHFSPRDWQRLINNNWGFRPKRLNFKLFNIQVKEVTTNDGVTTIANNLTSTVQVFSDSEYQLPYVLGSAHQGCLPPFPADVFMIPQYGYLTLNNGSQAVGRSSFYCLEYFPSQMLRTGNNFTFSYTFEEVPFHSSYAHSQSLDRLMNPLIDQYLYYLNRTQNQSGSAQNKDLLFSRGSPAGMSVQPKNWLPGPCYRQQRVSKTKTDNNNSNFTWTGASKYNLNGRESIINPGTAVASHKDDEDKFFPMSGVMIFGKESAGASNTALDNVMITDEEEIKATNPVATERFGTVAVNFQSSSTDPATGDVHAMGALPGMVWQDRDVYLQGPIWAKIPHTDGHFHPSPLMGGFGLKNPPPQILIKNTPVPANPPAEFSATKFASFITQYSTGQVSVEIEWELQKENSKRWNPEVQYTSNYAKSANVDFTVDNNGLYTEPRPIGTRYLTRPL

SEQ ID NO: 717 - protein, 736 aa, synthetic construct
  REGION 1..736: note = Description of Artificial Sequence: Synthetic polypeptide
MAADGYLPDWLEDNLSEGIREWWALKPGAPQPKANQQHQDNARGLVLPGYKYLGPGNGLDKGEPVNAADAAALEHDKAYDQQLKAGDNPYLKYNHADAEFQERLKEDTSFGGNLGRAVFQAKKRLLEPLGLVEEAAKTAPGKKRPVEQSPQEPDSSAGIGKSGAQPAKKRLNFGQTGDTESVPDPQPIGEPPAAPSGVGSLTMASGGGAPVADNNEGADGVGSSSGNWHCDSQWLGDRVITTSTRTWALPTYNNHLYKQISNSTSGGSSNDNAYFGYSTPWGYFDFNRFHCHFSPRDWQRLINNNWGFRPKRLNFKLFNIQVKEVTDNNGVKTIANNLTSTVQVFTDSDYQLPYVLGSAHEGCLPPFPADVFMIPQYGYLTLNDGSQAVGRSSFYCLEYFPSQMLRTGNNFQFGYEFENVPFHSSYAHSQSLDRLMNPLIDQYLYYLSKTINGSGQNQQTLKFSVAGPSNMAVQGRNYIPGPSYRQQRVSTTVTQNNNSEFAWPGASSWALNGRNSLMNPGPAMASHKEGEDRFFPLSGSLIFGKQGTGRDNVDADKVMITNEEEIKTTNPVATESYGQVATNHQSAQAQAQTGWVQNQGILPGMVWQDRDVYLQGPIWAKIPHTDGNFHPSPLMGGFGMKHPPPQILIKNTPVPADPPTAFNKDKLNSFITQYSTGQVSVEIEWELQKENSKRWDPEIQYTSNYYKSNNVEFAVNTEGVYSEPRPIGTRYLTRNL

SEQ ID NO: 718 - protein, 736 aa, synthetic construct
  REGION 1..736: note = Description of Artificial Sequence: Synthetic polypeptide
MAADGYLPDWLEDNLSEGIREWWALKPGAPQPKANQQHQDNARGLVLPGYKYLGPGNGLDKGEPVNAADAAALEHDKAYDQQLKAGDNPYLKYNHADAEFQERLKEDTSFGGNLGRAVFQAKKRLLEPLGLVEEAAKTAPGKKRPVEQSPQEPDSSAGIGKSGAQPAKKRLNFGQTGDTESVPDPQPIGEPPAAPSGVGSLTMASGGGAPVADNNEGADGVGSSSGNWHCDSQWLGDRVITTSTRTWALPTYNNHLYKQISNSTSGGSSNDNAYFGYSTPWGYFDFNRFHCRFSPRDWQRLINNNWGFRPKRLNFKLFNIQVKEVTDNNGVKTIANNLTSTVQVFTDSDYQLPYVLGSAHEGCLPPFPADVFMIPQYGYLTLNDGSQAVGRSSFYCLEYFPSQMLRTGNNFQFSYEFENVPFHSSYAHSQSLDRLMNPLIDQYLYYLSKTINGSGQNQQTLKFSVAGPSNMAVQGRNYIPGPSYRQQRVSTTVTQNNNSEFAWPGASSWALNGRNSLMNPGPAMASHKEGEDRFFPLSGSLIFGKQGTGRDNVDADKVMITNEEEIKTTNPVATESYGQVATNHQSAQAQAQTGWVQNQGILPGMVWQDRDVYLQGPIWAKIPHTDGNFHPSPLMGGFGMKHPPPQILIKNAPVPADPPTAFNKDKLNSFITQYSTGQVSVEIEWELQKENSKRWNPEIQYTSNYYKSNNVEFAVNTEGVYSEPRPIGTRYLTRNL

SEQ ID NO: 719 - protein, 736 aa, synthetic construct
  REGION 1..736: note = Description of Artificial Sequence: Synthetic polypeptide
MAADGYLPDWLEDNLSEGIREWWALKPGAPQPKANQQHQDNARGLVLPGYKYLGPGNGLDKGEPVSAADAAALEHDKAYDQQLKAGDNPYLKYNHADAEFQERLKEDTSFGGNLGRAVFQAKKRLLEPLGLVEEAAKTAPGKKRPVEQSPQEPDSSAGIGKSGAQPAKKRLNFGQTGDTESVPDPQPIGEPPAAPSGVGSLTMASGGGAPVADNNEGADGVGSSSGNWHCDSQWLGDRVITTSTRTWALPTYNNHLYKQISNSTSGGSSNDNAYFGYSTPWGYFDFNRFHCHFSPRDWQRLINNNWGFRPKRLNFKLFNIQVKEVTDNNGVKTIANNLTSTVQVFTDSDYQLPYVLGSAHEGCLPPFPADVFMIPQYGYLTLNDGSQAVGRSSFYCLEYFPSQMLRTGNNFQFSYEFENVPFHSSYAHSQSLDRLMNPLIDQYLYYLSKTINGSGQNQQTLKFSVAGPSNMAVQGRNYIPGPSYRQQRVSTTVTQNNNSEFAWPGASSWALNGRNSLMNPGPAMASHKEGEDRFFPLSGSLIFGKQGTGRDNVDADKVMITNEEEIKTTNPVATESYGQVATNHQSAQAQAQTGWVQNQGILPGMVWQDRDVYLQGPIWAKIPHTDGNFHPSPLMGGFGMKHPPPQILIKNTPVPADPPTAFNKDKLNSFITQYSTGQVSVEIEWELQKENSKRWNPEIQYTSNYYKSNNVEFAVNTEGVYSEPRPIGTRYLTRNL

SEQ ID NO: 720 - protein, 736 aa, synthetic construct
  REGION 1..736: note = Description of Artificial Sequence: Synthetic polypeptide
MAADGYLPDWLEDNLSEGIREWWALKPGAPQPKANQQHQDNARGLVLPGYKYLGPGNGLDKGEPVNAADAAALEHDKAYDQQLKAGDNPYLKYNHADAEFQERLKEDTSFGGNLGRAVFQAKKRLLEPLGLVEEAAKTAPGKKRPVEQSPQEPDSSAGIGKSGAQPAKKRLNFGQTGDTESVPDPQPIGEPPAAPSGVGSLTMASGGGAPVADNNEGADGVGSSSGNWHCDSQWLGDRVITTSTRTWALPTYNNHLYKQISNSTSGGSSNDNAYFGYSTPWGYFDFNRFHCHFSPRDWQRLINNNWGFRPKRLNFKLFNIQVKEVTDNNGVKTIANNLTSTVQVFTDSDYQLPYVLGSAHEGCLPPFPADVFMIPQYGYLTLNDGSQAVGRSSFYCLEYFPSQMLRTGNNFQFSYEFENVPFHSSYAHSQSLDRLMNPLIDQYLYYLSKTINGSGQNQQTLKFSVAGPSNTAVQGRNYIPGPSYRQQRVSTTVTQNNNSEFAWPGASSWALNGRNSLMNPGPAMASHKEGEDRFFPLSGSLIFGKQGTGRDNVDADKVMITNEEEIKTTNPVATESYGQVATNHQSAQAQAQTGWVQNQGILPGMVWQDRDVYLQGPIWAKIPHTDGNFHPSPLMGGFGMKHPPPQILIKNTPVPADPPTAFNKDKLNSFITQYSTGQVSVEIEWELQKENSKRWNPEIQYTSNYYKSNNVEFAVNTEGVYSEPRPIGTRYLTRNL

SEQ ID NO: 721 - protein, 736 aa, synthetic construct
  REGION 1..736: note = Description of Artificial Sequence: Synthetic polypeptide
MAADGYLPDWLEDNLSEGIREWWALKPGAPQPKANQQHQDNARGLVLPGYKYLGPGNGLDKGEPVNAADAAALEHDKAYDQQLKAGDNPYLKYNHADAEFQERLKEDTSFGGNLGRAVFQAKKRLLEPLGLVEEAAKTAPGKKRPVEQSPQEPDSSAGIGKSGAQPAKKRLNFGQTGDTESVPDPQPIGEPPAAPSGVGSLTMASGGGAPVADNNEGADGVGSSSGNWHCDSQWLGDRVITTSTRTWALPTYNNHLYKQISNSTSGGSSNDNAYFGYSTPWGYFDFNRFHCHFSPRDWQRLINNNWGFRPKRLNFKLFNIQVKEVTDNNGVKTIANNLTSTVQVFTDSDYQLPYVLGSAHEGCLPPFPADVFMIPQYGYLTLNDGSQAVGRSSFYCLEYFPSQMLRTGSNFQFSYEFENVPFHSSYAHSQSLDRLMNPLIDQYLYYLSKTINGSGQNQQTLKFSVAGPSNMAVQGRNYIPGPSYRQQRVSTTVTQNNNSEFAWPGASSWALNGRNSLMNPGPAMASHKEGEDRFFPLSGSLIFGKQGTGRDNVDADKVMITNEEEIKTTNPAATESYGQVATNHQSAQAQAQTGWVQNQGILPGMVWQDRDVYLQGPIWAKIPHTDGNFHPSPLMGGFGMKHPPPQILIKNTPVPADPPTAFNKDKLNSFITQYSTGQVSVEIEWELQKENSKRWNPEIQHTSNYYKSNNVEFAVNTEGVYSEPRPIGTRYLTRNL

SEQ ID NO: 722 - protein, 736 aa, synthetic construct
  REGION 1..736: note = Description of Artificial Sequence: Synthetic polypeptide
MAADGYLPDWLEDNLSEGIREWWALKPGAPQPKANQQHQDNARGLVLPGYKYLGPGNGLDKGEPVNAADAAALEHDKAYDQQLKAGDNPYLKYNHADAEFQERLKEDTSFGGNLGRAVFQAKKRLLEPLGLVEEAAKTAPGKKRPVEQSPQEPDSSAGIGKSGAQPAKKRLNFGQTGDTESVPDPQPIGEPPAAPSGVGSLTMASGGGAPVADNNEGADGVGSSSGNWHCDSQWLGDRVITTSTRTWALPTYNNHLYKQISNSTSGGSSNDNAYFGYSTPWGYFDFNRFHCHFSPRDWQRLINNNWGFRPKRLNFRLFNIQVKEVTDNNGVKTIANNLTSTVQVFTDSDYQLPYVLGSAHEGCLPPFPADVFMIPQYGYLTLNDGSQAVGRSSFYCLEYFPSQMLRTGNNFQFSYEFENVPFHSSYAHSQSLDRLMNPLIDQYLYYLSKTINGSGQNQQTLKFSVAGPSNMAVQGRNYIPGPSYRQQRVSTTVTQNNNSEFAWPGASSWALNGRNSLMNPGPAMASHKEGEDRFFPLSGSLIFGKQGTGRDNVDADKVMITNEEEIKTTNPVATESYGQVATNHQSAQAQAQTGWVQSQGILPGMVWQDRDVYLQGPIWAKIPHTDGNFHPSPLMGGFGMKHPPPQILIKNTPVPADPPTAFNKDKLNSFITQYSTGQVSVEIEWELQKENSKRWNPEIQYTSNYYKSNNVEFAVNTEGVYSEPRPIGTRYLTRNL

SEQ ID NO: 723 - protein, 735 aa, synthetic construct
  REGION 1..735: note = Description of Artificial Sequence: Synthetic polypeptide
MAADGYLPDWLEDNLSEGIREWWALKPGAPQPKANQQHQDNARGLVLPGYKYLGPGNGLDKGEPVNAADAAALEHDKAYDQQLKAGDNPYLKYNHADAEFQERLKEDTSFGGNLGRAVFQAKKRLLEPLGLVEEAAKTAPGKKRPVEQSPQEPDSSAGIGKSGAQPAKKRLNFGQTGDTESVPDPQPIGEPPAAPSGVGSLTMASGGGAPVADNNEGADGVGSSSGNWHCDSQWLGDRVITTSTRTWALPTYNNHLYKQISNSTSGGSSNDNAYFGYSTPWRYFDFNRFHCHFSPRDWQRLINNWGFRPKRLNFKLFNIQVKEVTDNNGVKTIANNLTSTVQAFTDSDYQLPYVLGSAHEGCLPPFPADVFMIPQYGYLTLNDGSQAVGRSSFYCLEYFPSQMLRTGNNFQFSYEFENVPFHSSYAHSQSLDRLMNPLIDQYLYYLSKTINGSGQNQQTLKFSVAGPSNMAVQGRNYIPGPSYRQQRVSTTVTQNNNSEFAWPGASSWALNGRNSLMNPGPAMASHKEGEDRFFPLSGSLIFGKQGTGRDNVDADKVMITNEEEIKTTNPVATESYGQVATNHQSAQAQAQTGWVQNQGILPGMVWQDRDVYLQGPIWAKIPHTDGNFHPSPLMGGFGMKHPPPQILIKNTPVPADPPTAFNKDELNSFITQYSTGQVSVEIEWELQKENSKRWNPEIQYTSNYYKSNNVEFAVNTEGVYSEPRPIGTRYLTRNL

SEQ ID NO: 724 - protein, 735 aa, synthetic construct
  REGION 1..735: note = Description of Artificial Sequence: Synthetic polypeptide
MAADGYLPDWLEDNLSEGIREWWALKPGAPQPKANQQHQDNARGLVLPGYKYLGPGNGLDKGEPVNAADAAALEHDKAYDQQLKAGDNPYLKYNHADAEFQERLKEDTSFGGNLGRAVFQDKKRLLEPLGLVEEAAKTAPGKKRPVEQSPQEPDSSAGIGKSGAQPAKKRLNFGQTGDTESVPDPQPIGEPPAAPSGVGSLTMASGGGAPVADNNEGADGVGSSSGNWHCDSQWLGDRVITTSTRTWALPTYNNHLYKQISNSTSGGSSNDNAYFGYSTPWGYFDFNRFHCHFSPRDWQRLINNWGFRPKRLNFKLFNIQVKEVTDNNGVKTIANNLTSTVQVFTDSDYQLPYVLGSAHEGCLPPFPADVFMIPQYGYLTLNDGSQAVGRSSFYCLEYFPSQMLRTGNNFQFSYEFENVPFHSSYAHSQSLDRLMNPLIDQYLYYLSKTINGSGQNQQTLKFSVAGPSNMAVQGRNYIPGPSYRQQRVSTTVTQNNNSEFAWPGASSWALNGRNSLMNPGPAMASHKEGEDRFFPLSGSLIFGKQGTGRDNVDADKVMITNEEEIKTTNPVATESYGQVATNHQSAQAQAQTGWVQNQGILPGMVWQDRDVYLQGPIWAKIPHTDGNFHPSPLMGGFGMKHPPPQILIKNTPVPADPPTAFNKDKLNSFITQYSTGQVSVEIEWELQKENSKRWNPEIQYTSNYYKSNNVEFAVNTEGVYSEPRPIGTRYLTRNL

SEQ ID NO: 725 - protein, 736 aa, synthetic construct
  REGION 1..736: note = Description of Artificial Sequence: Synthetic polypeptide
MAADGYLPDWLEDNLSEGIREWWALKPGAPQPKANQQHQDNARGLVLPGYKYLGPGNGLDKGEPVNAADAAALEHDKAYDQQLKAGDNPYLKYNHADAEFQERLKEDTSFGGNLGRAVFQAKKRLLEPLGLVEEAAKTAPGKKRPVEQSPQEPDSSAGIGKSGAQPAKKRLNFGQTGDTESVPDPQPIGEPPAAPSGVGSLTMASGGGAPVADNNEGADGVGSSSGNWHCDSQWLGDRAITTSTRTWALPTYNNHLYKQISNSTSGGSSNDNAYFGYSTPWGYFDFNRFHCHFSPRDWQRLINNNWGFRPKRLNFKLFNIQVKEVTDNNGVKTIANNLTSTVQVFTDSDYQLPYVLGSAHEGCLPPFPADVFMIPQYGYLTLNDGSQAVGRSSFYCLEYFPSQMLRTGNNFQFSYEFENVPFHSSYAHSQSLDRLMNPLIDQYLYYLSKTINGSGQNQQTLKFSVAGPSNMAVQGRNYIPGPSYRQQRVSTTVTQNNNSEFAWPGASSWALNGRNSLMNPGPAMASHKEGEDRFFPLSGSLIFGKQGTGRDNVDADKVMTTNEEEIKTTNPVATESYGQVATNHQSAQAQAQTGWVQNQGILPGMVWQDRDVYLQGPIWAKIPHTDGNFHPSPLMGGFGMKHPPPQILIKNTPVPADPPTAFNKDKLNSFITQYSTGQVSVEIEWELQKENSKRWNPEIQYTSNYYKSNNVEFAVNTEGVYSEPRPIGTRYLTRNL

SEQ ID NO: 726 - protein, 736 aa, synthetic construct
  REGION 1..736: note = Description of Artificial Sequence: Synthetic polypeptide
MAADGYLPDWLEDNLSEGIREWWALKPGAPQPKANQQHQDNARGLVLPGYKYLGPGNGLDKGEPVNAADAAALEHDKAYDQQLKAGDNPYLKYNHADAEFQERLKEDTSFGGNLGRAVFQTKKRLLEPLGLVEEAAKTAPGKKRPVEQSPQEPGSSAGIGKSGAQPAKKRLNFGQTGDTESVPDPQPIGEPPAAPSGVGSLTMASGGGAPVADNNEGADGVGSSSGNWHCDSQWLGDRVITTSTRTWALPTYNNHLYKQISNSTSGGSSNDNAYFGYSTPWGYFDFNRFHCHFSPRDWQRLINNNWGFRPKRLNFKLFNIQVKEVTDNNGVKTIANNLTSTVQVFTDSDYQLPYVLGSAHEGCLPPFPADVFMIPQYGYLTLNDGSQAVGRSSFYCLEYFPSQMLRTGNNFQFSYEFENVPFHSSYAHSQSLDRLMNPLIDQYLHYLSKTINGSGQNQQTLKFSVAGPSNMAVQGRNYIPGPSYRQQRVSTTVTQNNNSEFAWPGASSWALNGRNSLMNPGPAMASHKEGEDRFFPLSGSLIFGKQGTGRDNVDADKVMITNEEEIKTTNPVATESYGQVATNHQSAQAQAQTGWVQNQGILPGMVWQDRDVYLQGPIWAKIPHTDGNFHPSPLMGGFGMKHPPPQILIKNTPVPADPPTAFNKDKLNSFITQYSTGQVSVEIEWELQKENSKRWNPEIQYTSNYYKSNNVEFAVNTEGVYSEPRPIGTRYLTRNL

SEQ ID NO: 727 - protein, 736 aa, synthetic construct
  REGION 1..736: note = Description of Artificial Sequence: Synthetic polypeptide
MAADGYFPDWLEDNLSEGIREWWALKPGAPQPKANQQHQDNARGLVLPGYKYLGPGNGLDKGEPVNAADAAALEHDKAYDQQLKAGDNPYLKYNHADAEFQERLKEDTSFGGNLGRAVFQAKKRLLEPLGLVEEAAKTAPGKKRPVEQSPQEPDSSAGIGKSGAQPAKKRLNFGQTGDTESVPDPQPIGESPAAPSGVGSLTMASGGGAPVADNNEGADGVGSSSGNWHCDSQWLGDRVITTSTRTWALPTYNNHLYKQISNSTSGGSSNDNAYFGYSTPWGYFDFNRFHCHFSPRDWQRLINNNWGFRPKRLNFKLFNIQVKEVTDNNGVKTIANNLTSTVQVFTDSDYQLPYVLGSAHEGCLPPFPADVFMIPQYGYLTLNDGSQAVGRSSFYCLEYLPSQMLRTGNNFQFSYEFENVPFHSSYAHSQSLDRLMNPLIDQYLHYLSKTINGSGQNQQTLKFSVAGPSNMAVQGRNYIPGPSYRQQRVSTTVTQNNNSEFAWPGASSWALNGRNSLMNPGPAVASHKEGEDRFFPLSGSLIFGKQGTGRDNVDADKVMITNEEEIKTTNPVATESYGQVATNHQSAQAQAQTGWVQNQGILPGMVWQDRDVYLQGPIWAKIPHTDGNFHPSPLMGGFGMKHPPPQILIKNTPVPADPPTAFNKDKLNSFITQYSTGQVSVEIEWELQKENSKRWNPEIQYTSNYYKSNNVEFAVNTEGVYSEPRPIGTRYLTRNL

SEQ ID NO: 728 - protein, 736 aa, synthetic construct
  REGION 1..736: note = Description of Artificial Sequence: Synthetic polypeptide
MAADGYLPDWLEDNLSEGIREWWALKPGAPQPKANQQHQDNARGLVLPGYKYLGPGNGLDKGEPVNAADAAALEHDKAYDQQLKAGDNPYLKYNHADAEFQERLKEDTSFGGNLGRAVFQAKKRLLEPLGPVEEAAKTAPGKKRPVEQSPQEPDSSAGIGKSGAQPAKKRLNFGQTGDTESVPDPQPIGEPPAAPSGVGSLTMASGGGAPVADNNEGADGVGSSSGNWHCDSQWLGDRVITTSTRTWALPTYNNHLYKQISNSTSGGSSNDNAYFGYSTPWGYFDFNRFHCHFSPRDWQRLINNNWGFRPKRLNFKLFNIQVKEVTDNNGVKTIANNLTSTVQVFTDSDYQLPYVLGSAHEGCLPPFPADVFMIPQYGYLTLNDGSQAVGRSSFYCLEYFPSQMLRTGNNFQFSYEFENVPFHSSYAHSQSLDRLMNPLIDQYLYYLSKTINGSGQNQQTLKFSVAGPSNMAVQGRNYIPGPSYRQQRVSTTVTQNNNSEFAWPGASSWALNGRNSLMNPGPAMASHKEGEDRFFPLSGSLIFGKQGTGRDNVDADKVMITNEEEIKTTNPVATESYGQAATNHQSAQAQAQTGWVQNQGILPGMVWQDRDVYLQGPIWAKIPHTDGNFHPSPLMGGFGMKHPPPQILIKNTPVPADPPTAFNKDKLNSFITQYSTGQVSVEIEWELQKENSKRWNPEIQYTSNYYKSNNVEFAVNTEGVYSEPRPIGTRYLTRNL

SEQ ID NO: 729 - protein, 736 aa, synthetic construct
  REGION 1..736: note = Description of Artificial Sequence: Synthetic polypeptide
MAADGYLPDWLEDNLSEGIREWWALKPGAPQPKANQQHQDNARGLVLPGYKYLGPGNGLDKGEPVNAADAAALEHDKAYDQQLKAGDNPYLKYNHADAEFQERLKEDTSFGGNLGRAVFQAKKRLLEPLGPVEEAAKTAPGKKRPVEQSPQEPDSSAGIGKSGAQPAKKRLNFGQTGDTESVPDPQPIGEPPAAPSGVGSLTMASGGGAPVADNNEGADGVGSSSGNWHCDSQWLGDRVITTSTRTWALPTYNNHLYKQISNSTSGGSSNDNAYFGYSTPWGYFDFNRFHCHFSPRDWRRLINNNWGFRPKRLNFKLFNIQVKEVTDNNGVKTIANNLTSTVQVFTDSDYQLPYVLGSAHEGCLPPFPADVFMIPQYGYLTLNDGSQAVGRSSFYCLEYFPSQMLRTGNNFQFSYEFENVPFHSSYAHSQSLDRLMNPLIDQYLYYLSKTINGSGQNQQTLKFSVAGPSNMAVQGRNYIPGPSYRQQRVSTTVTQNNNSEFAWPGASSWALNGRNSLMNPGPAMASHKEGEDRFFPLSGSLIFGKQGTGRDNVDADKVMITNEEEIKTTNPVATESYGQVATNHQSAQAQAQTGWVQNQGILPGMVWQDRDVYLQGPIWAKIPHTDGNFHPSPLMGGFGMKHPPPQILIKNTPVPADPPTAFNKDKLNSFITQYSTGQVSVEIEWELQKENSKRWNPEIQYTSNYYKSNNVEFAVNTEGVYSEPRPIGTRYLTRNL

SEQ ID NO: 730 - protein, 736 aa, synthetic construct
  REGION 1..736: note = Description of Artificial Sequence: Synthetic polypeptide
MAADGYLPDWLEDNLSEGIREWWALKPGAPQPKANQQHQDNARGLVLPGYKYLGPGNGLDKGEPVNAADAAALEHDKAYDQQLKAGDNLYLKYNHADAEFQERLKEDTSFGGNLGRAVFQAKKRLLEPLGLVEEAAKTAPGKKRPVEQSPQEPDSSAGIGKSGAQPAKKRLNFGQTGDTESVPDPQPIGEPPAAPSGVGSLTMASGGGAPVADNNEGADGVGSSSGNWHCDSQWLGDRVITTSTRTWALPTYNNHLYKQISNSTSGGSSNDNAYFGYSTPWGYFDFNRFHCHFSPRDWQRLINNNWGFRPKRLNFKLFNIQVKEVTDNNGVKTIANNLTSTVQVFTDSDYQLPYVLGSAHEGCLPPFPADVFMIPQYGYLTLNDGSQAVGRSSFYCLEYFPSQMLRTGNNFQFSYEFENVPFHSSYAHSQSLDRLMNPLIDQYLHYLSKTINGSGQNQQTLKFSVAGPSNMAVQGRNYIPGPSYRQQRVSTTVTQNNNSEFAWPGASSWALNGRNSLMNPGPAMASHKEGEDRFFPLSGSLIFGKQGTGRDNVDADKVMITNEEEIKTTNPVATESYGQVATNHQSAQAQAQTGWVQNQGILPGMVWQDRDVYLQGPIWAKIPHTDGNFHPSPLMGGFGMKHPPPQILIKNTPVPADPPTAFNKDKLNSFITQYSTGQVSVEIEWELQKENSKRWNPEIQYTSNYYKSNNVEFAVNTEGVYSEPRPIGTRYLTRNL

SEQ ID NO: 731 - protein, 736 aa, synthetic construct
  REGION 1..736: note = Description of Artificial Sequence: Synthetic polypeptide
MAADGYLPDWLEDNLSEGIREWWALKPGAPQPKANQQHQDNARGLVLPGYKYLGPGNGLDKGEPVNAADAAALEHDKAYDQQLKAGDNPYLKYNHADAEFQERLKEDTSFGGNLGRAVFQAKKRLLEPLGLVEEAAKTAPGKKRPVEQSPQEPDSSAGIGKSGAQPAKKRLNFGQTGDTESVPDPQPIGEPPAAPSGVGSLTMASGGGAPVADNNEGADGVGSSSGNWHCDSQWLGDRVITTSTRTWALPTYNNHLYKQISNSTSGGSSNDNAYFGYSTPWGYFDFNRFHCHFSPRDWQRLINNNWGFRPKRLNFKLFNIQVKEVTDNNGVKTIANNLTSTVQVFTDSDYQLPYVLGSAHEGCLPPFPADVFMIPQYGYLTLNDGSQAVGRSSFYCLEYFPSQMLRTGNNFQFSYEFENVPFHSSYAHSQSLDRLMNPLIDQYLHYLSKTINGSGQNQQTLKFSVAGPSNMAVQGRNYIPGPSYRQQRVSTTVTQNNNSEFAWPGASSWALNGRNSLMNPGPAMASHKEGEDRFFPLSGSLIFGKQGTGRDNVDADKVMITNEEEIKTTNPVATESYGQVATNHQSAQAQAQTGWVQNQGILPGMVWQDRDVYLQGPIWAKIPHTDGNFHPSPLMGGFGMKHPPPQILIKNTPVPADPPTAFNKDKLNSFITQYSTGQVSVEIEWELQKENSKRWNPEIQYTSNYYKSNNVEFAVNTEGVYSEPRPIGTRYLTRNL

SEQ ID NO: 732 - protein, 736 aa, synthetic construct
  REGION 1..736: note = Description of Artificial Sequence: Synthetic polypeptide
  VARIANT 442: note = MOD_RES - Any amino acid
MAADGYLPDWLEDNLSEGIREWWALKPGAPQPKANQQHQDNARGLVLPGYKYLGPGNGLDKGEPVNAADAAALEHDKAYDQQLKAGDNPYLKYNHADAEFQERLKEDTSFGGNLGRAVFQAKKRLLEPLGLVEEAAKTAPGKKRPVEQSPQEPDSSAGIGKSGAQPAKKRLNFGQTGDTESVPDPQPIGEPPAAPSGVGSLTMASGGGAPVADNNEGADGVGSSSGNWHCDSQWLGDRVITTSTRTWALPTYNNHLYKQISTSTSGGSSNDNAYFGYSTPWGYFDFNRFHCHFSPRDWQRLINNNWGFRPKRLNFKLFNIQVKEVTDNNGVKTIANNLTSTVQVFTDSDYQLPYVLGSAHEGCLPPFPADVFMIPQYGYLTLNDGSQAVGRSSFYCLEYFPSQMLRTGNNFQFSYEFENVPFHSSYAHSQSLDRLMNPLIDXYLHYLSKTINGSGQNQQTLKFSVAGPSNMAVQGRNYIPGPSYRQQRVSTTVTQNNNSEFAWPGASSWALNGRNSLMNPGPAMASHKEGEDRFFPLSGSLIFGKQGTGRDNVDADKVMITNEEEIKTTNPVATESYGQVATNHQSAQAQAQTGWVQNQGILPDMVWQDRDVYLQGPIWAKIPHTDGNFHPSPLMGGFGMKHPPPQILIKNTPVPADPPTAFNKDKLNSFITQYSTGQVSVEIEWELQKENSKRWNPEIQYTSNYYKSNNVEFAVNTEGVYSEPRPIGTRYLTRNL

SEQ ID NO: 733 - protein, 736 aa, synthetic construct; identical to SEQ ID NO: 713
  REGION 1..736: note = Description of Artificial Sequence: Synthetic polypeptide

SEQ ID NO: 734 - protein, 736 aa, synthetic construct; identical to SEQ ID NO: 717
  REGION 1..736: note = Description of Artificial Sequence: Synthetic polypeptide

SEQ ID NO: 735 - protein, 736 aa, synthetic construct
  REGION 1..736: note = Description of Artificial Sequence: Synthetic polypeptide
MAADGYLPDWLEDNLSEGIREWWALKPGAPQPRANQQHQDNARGLVLPGYKYLGPGNGLDKGEPVNAADAAALEHDKAYDQQLKAGDNPYLKYNHADAEFQERLKEDTSFGGNLGRAVFQAKKRLLEPLGLVEEAAKTAPGKKRPVEQSPQEPDSSAGIGKSGAQPAKKRLNFGQTGDTESVPDPQPIGEPPAAPSGVGSLTMASGGGAPVADNNEGADGVGSSSGNWHCDSQWLGDRVITTSTRTWALPTYNNHLYKQISNSTSGGSSNDNAYFGYSTPWGYFDFNRFHCHFSPRDWQRLINNNWGFRPKRLNFKLFNIQVKEVTDNNGVKTIANNLTSTVQVFTDSDCQLPYVLGSAHEGCLPPFPADVFMIPQYGYLTLNDGSQAVGRSSFYCLEYFPSQMLRTGNNFQFSYEFENVPFHSSYAHSQSLDRLTNPLIDQYLYYLSKTINGSGQNQQTLKFSVAGPSNMAVQGRNYIPGPSYRQQRVSTTVTQNNNSEFAWPGASSWALNGRNSLMNPGPAMASHKEGEDRFFPLSGSLIFGKQGTGRDNVDADKVMITNEEEIKTTNPVATESHGQVATNHQSAQAQAQTGWVQNQGILPGMVWQDRDVYLQGPIWAKIPHTDGNFHPSPLMGGFGMKHPPPQILIKNTPVPADPPTAFNKDKLNSFITQYSTGQVSVEIEWELQKENSKRWNPEIQYTSNYYKSNNVEFAVNTEGVYSEPRPIGTRYLTRNL

SEQ ID NO: 736 - protein, 736 aa, synthetic construct
  REGION 1..736: note = Description of Artificial Sequence: Synthetic polypeptide
MAADGYLPDWLEDNLSEGIREWWALKPGAPQPKANQQHQDNARGLVLPGYKYLGPGNGLDKGEPVNAADAAALEHDKAYDQQLKAGDNPYLKYNHADAEFQERLKEDTSFGGNLGRAVFQAKKRLLEPLGLVEEAAKTAPGKKRPVEQSPQEPDSSAGIGKSGAQPAKKRLNFGQTGDTESVPDPQPIGEPPAAPSGVGSLTMASGGGAPVADNNEGADGVGSSSGNWHCDSQWLGDRVITTSTRTWALPTYNNHLYKQISNSTSGGSSNDNAYFGYSTPWGYFDFNRFHCHFSPRDWQRLINNNWGFRPKRLNFKLFNIQVKEVTDNNGVKTIANNLTSTVQVFTDSDYQLPYVLGSAHEGCLPPFPADVFMIPQYGYLTLNDGSQAVGRSSFYCLEYFPSQMLRTGNNFQFSYEFENVPFHSSYAHSQSLDRLMNPPIDQYLYYLSKTINGSGQNQQTLKFSVAGPSNMAVQGRNYIPGPSYRQQRVSTTVTQNNNSEFAWPGASSWALNGRNSLMNPGPAMASHKEGEDRFFPLSGSLIFGKQGTGRDNVDADKVMITNEEEIKTTNPVATESYGQVATNHQSAQAQAQTGWVQNQGILPGMVWQDRDVYLQGPIWAKIPHTDGNFHPSPLMGGFGMKHPPPQILIKNTPVPADPPTAFNKDKLNSFITQYSTGQVSVEIEWELQKENSKRWNPEIQYTSNYYKSNNVEFAVNTEGVYGEPRPIGTRYLTRNL

SEQ ID NO: 737 - protein, 736 aa, synthetic construct
  REGION 1..736: note = Description of Artificial Sequence: Synthetic polypeptide
MAADGYLPDWLEDNLSEGIREWWALKPGAPQPKANQQHQDNARGLVLPGYKYLGPGNGLDKGEPVNAADAAALEHDKAYDQQLKAGDNPYLKYNHADAEFQERLKEDTSFGGNLGRAVFQAKKRLLEPLGLVEEAAKTAPGKKRPVEQSPQEPDSSAGIGKSGAQPAKKRLNFGQTGDTESVPDPQPIGEPPAAPSGVGSLTMASGGGAPVADNNEGADGVGSSSGNWHCDSQWLGDRVITTSTRTWALPTYNNHLYKQISNSTSGGSSNDNAYFGYSTPWGYFDFNRFHCHFSPRDRQRLINNNWGFRPKRLNFKLFNIQVKEVTDNNGVKTIANNLTSTVQVFTDSDYQLPYVLGSAHEGCLPPFPADVFMIPQYGYLTLNDGSQAVGRSSFYCLEYFPSQMLRTGNNFQFSYEFENVPFHSSYAHSQSLDRLMNPLIDQYLYYLSKTINGSGQNQQTLKFSVAGPSNMAVQGRNYIPGPSYRQQRVSTTVTQNNNSEFAWPGASSWALNGRNSLMNPGPAMASHKEGEDRFFPLSGSLIFGKQGTGRDNVDADKVMITNEEEIKTTNPVATESYGQVATNHQSAQAQAQTGWVQNQGILPGMVWQDRDVYLQGPIWAKIPHTDGNFHPSPLMGGFGMKHPPPQILIKNTPVPADPPTAFNKDKLNSFITQYSTGQVSVEIEWELQKENSKRWNPEIQYTSNYYKSNNVEFAVNTEGVYSEPRPIGTRYLTRNL

SEQ ID NO: 738 - protein, 736 aa, synthetic construct
  REGION 1..736: note = Description of Artificial Sequence: Synthetic polypeptide
MAADGYLPDWLEDNLSEGIREWWALKPGAPQPKANQQHQDNARGLVLPGYKYLGPGNGLDKGEPVNAADAAALEHDKAYDQQLKAGDNPYLKYNHADAEFQERLKEDTSFGGNLGRAVFQAKKRLLEPLGLVEEAAKTAPGKKRPVEQSPQEPDSSAGIGKSGAQPAKKRLNFGQTGDTESVPDPQPIGEPPAAPSGVGSLTMASGGGAPVADNNEGADGVGSSSGNWHCNSQWLGDRVITTSTRTWALPTYNNHLYKQISNSTSGGSSNDNAYFGYSTPWGYFDFNRFHCHFSPRDWQRLINNNWGFRPKRLNFKLFNIQVKEVTDNNGVKTIANNLTSTVQVFTDSDYQLPYVLGSAHEGCLPPFPADVFMIPQYGYLTLNDGSQAVGRSSFYCLEYFPSQMLRTGNNFQFSYEFENVPFHSSYAHSQSLDRLMNPLIDQYLYYLSKTINGSGQNQQTLKFSVAGPGNMAVQGRNYIPGPSYRQQRVSTTVTQNNNSEFAWPGASSWALNGRNSLMNPGPAMASHKEGEDRFFPLSGSLIFGKQGTGRDNVDADKVMITNEEEIKTTNPVATESYGQVATNHQSAQAQAQTGWVQNQGILPGMVWQDRDVYLQGPIWAKIPHTDGNFHPSPLMGGFGMKHPPPQILIKNTPVPADPPTAFNKDKLNSFITQYSTGQVSVEIEWELQKENSKRWNPEIQYTSNYYKSNNVEFAVNTEGVYSEPRPIGTRYLTRNL

SEQ ID NO: 739 - protein, 736 aa, synthetic construct
  REGION 1..736: note = Description of Artificial Sequence: Synthetic polypeptide
MAADGYLPDWLEDNLSEGIREWWALKPGAPQPKANQQHQDNARGLVLPGYRYLGPGNGLDKGEPVNAADAAALEHDKAYDQQLKAGDNPYLKYNHADAEFQERLKEDTSFGGNLGRAVFQAKKRLLEPLGLVEEAAKTAPGKKRPVEQSPQEPDSSAGIGKSGAQPAKKRLNFGQTGDTESVPDPQPIGEPPAAPSGVGSLTMASGGGAPVADNNEGADGVGSSSGNWHCDSQWLGDRVITTSTRTWALPTYNNHLYKQISNSTSGGSSNDNAYFGYSTPWGYFDFNRFHCHFSPRDWQRLINNNWGFRPKRLNFKLFNIQVKEVTDNNGVKTVANNLTSTVQVFTDSDYQLPYVLGSAHEGCLPPFPADVFMIPQYGYLTLNDGSQAVGRSSFYCLEYFPSQMLRTGNNFQFSYEFENVPFHSSYAHSQSLDRLMNPLIDQYLYYLSKTINGSGQNQQTLKFSVAGPSNMAVQGRNYIPGPSYRQQRVSTTVTQNNNSEFAWPGASSWALNGRNSLMNPGPAMASHKEGEDRFFPLSGSLIFGKQGTGRDNVDADKVMITNEEEIKTTNPVATESYGQVATNHQSAQAQAQTGWVQNQGILPGMVWQDRDVYLQGPIWAKIPHTDGNFHPSPLMGGFGMKHPPPQILIKNTPVPADPPTAFNKDKLNSFITQYSTGQVSVEIEWELQKENSKRWNPEIQYTSNYYKSNNVEFAVNTEGVYSGPRPIGTRYLTRNL

SEQ ID NO: 740 - protein, 736 aa, synthetic construct; identical to SEQ ID NO: 150
  REGION 1..736: note = Description of Artificial Sequence: Synthetic polypeptide

SEQ ID NO: 741 - protein, 736 aa, synthetic construct
  REGION 1..736: note = Description of Artificial Sequence: Synthetic polypeptide
MAADGYLPDWLEDNLSEGIREWWALKPGAPQPKANQQRQDNARGLVLPGYKYLGPGNGLDKGEPVNAADAAALEHDKAYDQQLKAGGNPCLKYNHADAEFQERLKEDTSFGGNLGRAVFQAKKRLLEPLGLVEEAAKTAPGKKRPVEQSPQEPDSSAGIGRSGAQPAKKRLNFGQTGDTESVPDPQPIGEPPAAPSGVGSLTMASGGGAPVADNNEGADGVGSSSGNWHCDSQWLGDRVITTSTRTWALPTYNNHLYKQISNSTSGGSSNDNAYFGYSTPWGYFDFNRFHCHFSPRDWQRLINNNWGFRPKRLNFKLFNIQVKEVTDNNGVKAIANNLTSTVQVFTDSDYQLPYVLGSAHEGCLPPFPADVFMIPQYGYLTLNDGSQAVGRSSFYCLEYFPSQMLRTGNNFQFSYEFENVPFHSSYAHSQSLDRLMNPLIDQYLYYLSKTIDGSGQNQQTLKFSVAGPSNMAVQGRNYIPGPSYRQQRVSTTVTQNNNSEFAWPGASSWALNGRNSLMDPGPAMASHKEGEDRFFPLSGSLIFGKQGTGRDNVDADKVMITNEEEIKTTNPVATESYGQVATNHQSAQAQAQTGWVQNQGILPGMVWQDRDVYLQGPIWAKIPHTGGNFHPSPLMGGFGMKHPPPQILIKNTPVPADPPTAFNKDKLNSFITQYSTGQVSVEIEWELQKENSKRWNPEIQYTSNYYKSNNVEFAVNTEGVYSEPRPIGTRYLTRNL

SEQ ID NO: 742 - protein, 736 aa, synthetic construct
  REGION 1..736: note = Description of Artificial Sequence: Synthetic polypeptide
MAADGYLPDWLEDNLSEGIREWWALKPGAPQPKANQQHQDNARGLVLPGYKYLGPGNGLDKGEPVNAADAAALEHDKAYDQQLKAGDNPYLKYNHADAEFQERLKEDTSFGGNLGRAVFQAKKRLLEPLGLVEEAAKTAPGKKRPVEQSPQEPDSSAGIGKSGAQPAKKRLNFGQTGDTESVPDPQPIGEPPAAPSGVGSLTMASGGGAPVADNNEGADGVGSSSGNWHCDSQWLGDRVITTSTRTWALPTYNNHLYKQISNSTSGGSSNDNAYFGYSTPWGYFDFNRFHCHFSPRDWQRLINNNWGFRPKRLNFKLFNIQVKEVTDNNGVKTIANNLTSTVQVFTDSDYQLPYVLGSAHEGCLPPFPADVFMIPQYGYLTLNDGSQAVGRSSFYCLEYFPSQMLRTGNNFQFSYEFENVPFHSSYAHSQSLDRLMNPLIDQYLYYLSKTINGSGQNQQTLKFSVAGPSNMAVQGRNYIPGPSYRQQRVSTTVTQNNNSEFAWPGASSWALNGRNSLMNPGPAMASHKEGEDRFFPLSGSLIFGKQGTGRDNVDADKVMITNEEEIKTTNPVATESYGQVATNHQSAQAQAQTGWVQNQGILPGMVWQDRDVYLQGPIWAKIPHTDGNFHPSPLMGGFGMKHPPPQILIKNTPVPADPPTAFNKDKLNSFITQYSTGQVSVEIEWELQKENSKRWNPEIQYTSNYYKPNNVEFAVNTEGVYSEPRPIGTRYLTRNL

SEQ ID NO: 743 - protein, 736 aa, synthetic construct
  REGION 1..736: note = Description of Artificial Sequence: Synthetic polypeptide
MAADGYLPDWLEDNLSEGIREWWALKPGAPQPKANQQHQDNARGLVLPGYKYLGPGNGLDKGEPVNAADAAALEHNKAYDQQLKAGDNPYLKCNHADAEFQERLKEDTSFGGNLGRAVFQAKKRPLEPLGLVEEAAKTAPGKKRPVEQSPQEPDSSAGIGKSGAQPAKKRLNFGQTGDTESVPDPQPIGEPPAAPSGVRSLTMASGGGAPVADNNEGADGVGSSSGNWHCDSQWLGDRVITTSTRTWALPTYNNHLYKQISNSTSGGSSNDNAYLGYSTPWGYFDFNRFHCHFSPRDWQRLINNNWGFRPKRLNFKLFNIQVKEVTDNNGVKTIANNLTSTVQVFTDSDYQLPYVLGSAHEGCLPPFPADVFMIPQYGYLTLNDGSQAVGRSSFYCLEYFPSQMLRTGNNFQFSYEFENVPFHSSYAHSQSLDRLMNPLIDQYLYYLSKTINGSGQNQQTLKFSVAGPSNMAVQGRNYIPGPSYRQQRVSTTVTQNNNSEFAWPGASSWALNGRNSLMNPGPTMASHKEGEDRFFPLSGSLIFGKQGTGRDNVDADKVMITNEEEIKTTNPVATESYGQVATNHQSAQAQAQTGWVQNQGILPGMVWQDRDVYLQGPIWAKIPHTDGNFHPSPLMGGFGMKHPPPQILIKNTPVPADPPTAFNKDKLNSFITQYSTGQVSVEIEWELQKENSKRWNPEIQYTSNYYKSNNVEFAVNTEGVYSEPRPIGTRYLTRNL

SEQ ID NO: 744 - protein, 736 aa, synthetic construct
  REGION 1..736: note = Description of Artificial Sequence: Synthetic polypeptide
MAADGYLPDWLEDNLSEGIREWWALKPGAPQPKANQQHQDNARGLVLPGYKYLGPGNGLDKGEPVNAADAAALVHDKAYDQQLKAGDNPYLKCNHADAEFQERLKEDTSFGGNLGRAVFQAKKRLLEPLGLVEEAAKTAPGKKRPVEQSPQEPDSSAGIGKSGAQPAKKRLNFGQTGDTESVPDPQPIGEPPAAPSGVGSLTMASGGGAPVADNNEGADGVGSSSGNWHCDSQWLGDRVITTSTRTWALPTYNNHLYKQISNSTSGGSSNDNAYLGYSTPWGYFDFNRFHCHFSPRDWQRLINNNWGFRPKRLNFKLFNIQVKEVTDNNGVKTIANNLTSTVQVFTDSDYQLPYVLGSAHEGCLPPFPADVFTIPQYGYLTLNDGSQAVGRSSFYCLEYFPSQMLRTGNNFQFSYEFENVPFHSSYAHSQSLDRLMNPLIDQYLYYLSKTINGSGQNQQTLKFSVAGPSNMAVQGRNYIPGPSYRQQRVSTTVTQNNNSEFAWPGASSWALNGRNSLMNPGPAMASHKEGEDRFFPLSGSLIFGKQGTGRDNVDADKVMITNEEEIKTTNPVATESYGQVATNHQSAQAQAQTGWVQNQGILPGMVWQDRDVYLQGPIWAKIPHTDGNFHPSPLMGGFGMKHPPPQILIKNTPVPADPPTAFNKDKLNSFITQYSTGQVSVEIEWELQKENSKRWNPEIQYTSNYYKSNNVEFAVNTEGVYSEPRPIGPRYLTRNF

SEQ ID NO: 745 - protein, 736 aa, synthetic construct
  REGION 1..736: note = Description of Artificial Sequence: Synthetic polypeptide
MAADGYLPDWLEDNLSEGIREWWALKPGAPQPKANQQHQDNARGLVLPGYKYLGPGNGLDKGEPVNAADAAALEHNKAYDQQLKAGDNPYLKCNHADAEFQERLKEDTSFGGNLGRAVFQAKKRLLEPLGLVEEAAKTAPGKKRPVEQSPQEPDSSAGIGKSGAQPAKKRLNFGQTGDTESVPDPQPIGEPPAAPSGVRSLTMASGGGAPVADNNEGADGVGSSSGNWHCDSQWLGDRVITTSTRTWALPTYNNHLYKQISNSTSGGSSNDNAYLGYSTPWGYFDFNRFHCHFSPRDWQRLINNNWGFRPKRLNFKLFNIQVKEVTDNNGVKTIANNLTSTVQVFTDSDYQLPYVLGSAHEGCLPPFPADVFMIPQYGYLTLNDGSQAVGRSSFYCLEYFPSQMLRTGNNFQFSYEFENVPFHSSYAHSQSLDRLMNPLIDQYLYYLSKTINGSGQNQQTLKFSVAGPSNMAVQGRNYIPGPSYRQQRVSTTVTQNNNSEFAWPGASSWALNGRNSLMNPGPAMASHKEGEDRFFPLSGSLIFGKQGTGRDNVDADKVMITNEEEIKTTNPVATESYGQVATNHQSAQAQAQTGWVQNQGILPGMVWQDRDVYLQGPIWAKIPHTDGNFHPSPLMGGFGMKHPPPQILIKNTPVPADPPTAFNKDKLNSFITQYSTGQVSVEIEWELQKENSKRWNPEIQYTSNYYKSNNVEFAVNTEGVYSEPRPIGTRYLTRNL

SEQ ID NO: 746 - protein, 736 aa, synthetic construct
  REGION 1..736: note = Description of Artificial Sequence: Synthetic polypeptide
MAADGYLPDWLEDNLSEGIREWWALKPGAPQPKANQQHQDNARGLVLPGYKYLGPGNGLDKGEPVNAADAAALEHDKAYDQQLKAGDNPYLKCNHADAEFQERLKEDTSFGGNLGRAVFQAKKRLLEPLGLVEEAAKTAPGKKRPVEQSPQEPDSSAGIGKSGAQPAKKRLNFGQTGDTESVPDPQPIGEPPAAPSGVGSLTMASGGGAPVADNNEGADGVGSSSGNWHCDSQWLGDRVITTSTRTWALPTYNNHLYKQISNSTSGGSSNDNAYLGYSTPWGYFDFNRFHCHFSPRDWQRLINNNWGFRPKRLNFELFNIQVKEVTDNNGVKTIANNLTSTVQVFTDSDYQLPYVLGSAHEGCLPPFPADVFMIPQYGYLTLNDGSQAVGRSSFYCLEYFPSQMLRTGNNFQSSYEFENVPFHSSYAHSQSLDRLMNPLIDQYLYYLSKTINGSGQNQQTLKFSVAGPSNMAVQGRNYIPGPSYRQQRASTTVTQNNNSEFAWPGASSWALNGRNSLMNPGPAMASHKEGEDRFFPLSGSLIFGKQGTGRDNVDADKVMITNEEEIKTTNPVATESYGQVATNHQSAQAQAQTGWVQNQGILPGMVWQDRDVYLQGPIWAKIPHTDGNFHPSPLMGGFGMKHPPPQILIKNTPVPADPPTAFNKDKLNSFITQYSTGQVSVEIEWELQKENSKRWNPEIQYTSNYYKSNNVEFAVNTEGVYSEPRPIGTRYLTRNL

SEQ ID NO: 747 - protein, 736 aa, synthetic construct
  REGION 1..736: note = Description of Artificial Sequence: Synthetic polypeptide
MAADGYLPDWLEDNLSEGIREWWALKPGAPQPKANQQHQDNARGLVLPGYKYLGPGNGLDKGEPVNAADAAALEHDKAYDQQLKAGDNPYLKCNHADAEFQERLKEDTSFGGNLGRAVFQAKKRLLEPLGLVEEAAKTAPGKKRPVEQSPQEPDSSAGIGKSGAQPAKKRLNFGQTGDTESVPDPQPIGEPPAAPPGVGSLTMASGGGAPVADNNEGADGVGSSSGNWHCDSQWLGDRVITTSTRTWALPTYNNHLYKQISNSTSGGSSNDNAYLGYSTPWGYFDFNRFHCHFSPRDWQRLINNNWGFRPKRLNFKLFNIQVKEVTDNNGVKTIANNLTSTVQVFTDSDYQLPYVLGSAHEGCLPPFPADVFMIPQYGYLTLNDGSQAVGRSSFYCLEYFPSQMLRTGNNFQFSYEFENVPFHSSYAHSQSLDRLMNPLIDQYLYYLSKTISGSGQNQQTLKFSVAGPSNMAVQGRNYIPGPSYRQQRVSTTVTQNNSSEFAWPGASSWALNGRNSLMNPGPAMASHKEGEDRFFPLSGSLIFGKQGTGRDNVDADKVMITNEEEIKTTNPVATESYGQVATNHQSAQAQAQTGWVQNQGILSGMVWQDRDVYLQGPIWAKIPHTDGNFHPSPLMGGFGMKHPPPQILIKNTPVPADPPTAFNKDKLNSFITQYSTGQVSVEIEWELQKENSKRWNPEIQYTSNYYKSNNVEFAVNTEGVYSEPRPIGTRYLTRNL

SEQ ID NO: 748 - protein, 736 aa, synthetic construct
  REGION 1..736: note = Description of Artificial Sequence: Synthetic polypeptide
MAADGYLPDWLEDNLSEGIREWWALKPGAPQPKANQQHQDNARGLVLPGYKYLGPGNGLDKGEPVNAADAAALEHDKAYDQQLKAGDNPYLKCNHADAEFQERLKEDTSFGGNLGRAVFQAKKRLLEPLGLVEEAAKTAPGKKRPVEQSPQEPDSSAGIGKSGAQPAKKRLNFGQTGDTESVPDPQPIGEPPAAPSGVGSLTMASGGGAPVADNNEGADGVGSSSGNWHCDSQWLGDRVITTSTRTWALPTYNNHLYKQISNSTSGGSSNDNAYLGYSTPWGYFDFNRFHCHFSPRDWQRLINNNWGFRPKRLNFKLFNIQVKEVTDNNGVKTIANNLTSTVQVFTDSDYQLPYVLGSAHEGCLPPFPADVFMIPQYGYLTLNDGSQAVGRSSFYCLEYFPSQMLRTGNNFQFSYEFENVPFHSSYAHSQSLDRLMNPLIDQYLYYLSKTINGSGQNQQTLKFSVAGPSNMAVQGRNYIPGPSYRQQRVSTTVTQNNNSEFAWPGASSWALNGRNSLMNPGPAMASHKEGEDRFFPLSGSLIFGKQGTGRDNVDADKVMITNEEEIKTTNPVATESYGQVATNHQSAQAQAQTGWVQNQGILPGMVWQDRDVYLQGPIWAKIPHTDGNFHPSPLMGGFGMKHPPPQILIKNTPVPADPPTAFNKDKLNSFITQYSTGQVSVEIEWELQKENSKRWNPEIQYTSNYYKSNNVEFAVNTEGVYSEPRPIGTRYLTRNL

SEQ ID NO: 749 - protein, 736 aa, synthetic construct; identical to SEQ ID NO: 748
  REGION 1..736: note = Description of Artificial Sequence: Synthetic polypeptide

SEQ ID NO: 750 - protein, 736 aa, synthetic construct
  REGION 1..736: note = Description of Artificial Sequence: Synthetic polypeptide
MAADGYLPDWLEDNLSEGIREWWALKPGAPQPKANQQHQDNARGLVLPGYKYLGPGNGLDKGEPVNAADAAALEHDKAYDQQLKAGDNPYLKCNHADAEFQERLKEDTSFGGNLGRAVFQAKKRLLEPLGLVEEAAKTAPGKKRPVEQSPQEPDSSAGIGKSGAQPAKKRLNFGQTGDTESVPDPQPIGEPPAAPSGVGSLTMASGGGAPVADNNEGADGVGSSSGNWHCDSQWLGDRVITTSTRTWALPTYNNHLYKQISNSTSGGSSNDNAYLDYSTPWGYFDFNRFHCHFSPRDWQRLINNNWGFRPKRLNFKLFNIQVKEVTDNNGVKTIANNLTSTVQVFTDSDYQLPYVLGSAHEGCLPPFPADVFMIPQYGYLTLNDGSQAVGRSSFYCLEYFPSQMLRTGNNFQFSYEFENVPFHSSYAHSQSLDRLMNPLIDQYLYYLSKTINGSGQNQQTLKFSVAGPSNMAVQGRNYIPGPSYRQQRVSTTVTQNNNSEFAWPGASSWALNGRNSLMNPGPAMASHKEGEDRFFPLSGSLIFGKQGTGRDNVDADKVMITNEEEIKTTNPVATESYGQVATNHQSAQAQAQTGWVQNQGILPGMVWQGRDVYLQGPIWAKIPHTDGNFHPSPLMGGFGMKHPPPQILIKNTPVPADPPTAFNKDKLNSFITQYSTGQVSVEIEWELQKENSKRWNPEIQYTSNYYKSNNVEFAVNTEGVYSEPRPIGTRYLTRNL

SEQ ID NO: 751 - protein, 736 aa, synthetic construct; identical to SEQ ID NO: 748
  REGION 1..736: note = Description of Artificial Sequence: Synthetic polypeptide

SEQ ID NO: 752 - protein, 736 aa, synthetic construct
  REGION 1..736: note = Description of Artificial Sequence: Synthetic polypeptide
MAADGYPPDWLEDNLSEGIREWWALKPGAPQPKANQQHQDNARGLVLPGYKYLGPGNGLDKGEPVNAADAAALEHDKAYDQQLKAGDNPHLKYNHADAEFQERLKEDTSFGGNLGRAVFQAKKRLLEPLGLVEEAAKTAPGKKRPVEQSPQEPDSSAGIGKSGAQPAKKRLNFGQTGDTESVPDPQPIGEPPAAPSGVGSLTMASGGGAPVADNNEGADGVGSSSGNWHCDSQWLGDRVITTSTRTWALPTYNNHLYKQISNSTSGGSSNDNAYFGYSTPWGYFDFNRFHCHFSPRDWQRLINNNWGFRPKRLNFKLFNIQVKEVTDNNGVKTIANNLTSTVQVFTDSDYQLPYVLGSAHEGCLPPFPADVFMIPQYGYLTLNDGSQAVGRSSFYCLEYFPSQMLRTGNNFQFSYEFENVPFHSSYAHSQSLDRLMNPLIDQYLYYLSKTINGSGQNQQTLKFSVAGPSNMAVQGRNYIPGPSYRQQRVSTTVTQNNNSEFAWPGASSWALNGRNSLMNPGPAMASHKEGEDRFFPLSGSLIFGKQGTGRDNVDADKVMITNEEEIKTTNPVATESYGQVATNHQSAQAQAQTGWVQNQGILPGMVWQDRDVYLQGPIWAKIPHTDGNFHPSPLMGGFGVKHPPPQILIKNTPVPADPPTAFNKDRLNSFITQYSTGQVSVEIEWELQKENSKRWNPEIQYTSNYYKSNNVEFAVNTEGVYSEPRPIGTRYLTRNL

SEQ ID NO: 753 - protein, 736 aa, synthetic construct
  REGION 1..736: note = Description of Artificial Sequence: Synthetic polypeptide
MAADGYLPDWLEDNLSEGIREWWALKPGAPQPKANQQHQDNARGLVLPGYKYLGPGNGLDKGEPVNAADAAALEHDKAYDQQLKAGDNPYLKYNHADAEFQERLKEDTSFGGNLGRAVFQAKKRLLEPLGLVEEAAKTAPGKKRPVEQSPQEPDSSAGIGKSGAQPAKKRLNFGQTGDTESVPDPQPIGEPPAAPSGVGSLTMASGGGAPVADNNEGADGVGSSSGNWHCDSQWLGDRVITTSTRTWALPTYNNHLYKQISNSTSGGSSNDNAYFGYSTPWGYFDFNRFHCHFSPRDWQRLINNNWGFRPKRLNFKLFNIQVKEVTDNNGVKTIANNLTSTVQVFTDSDYQLPYVLGSAHEGCLPPFPADVFMIPQYGYLTLNDGSQAVGRSSFYCLEYFPSQMLRTGNNFQFSYEFENVPFHSSYAHSQSLDRLMNPLIDQYLYYLSKTINGSGQNQQTLKFSVAGPSNMAVQGRNYIPGPSYRQQRVSTTVTQNNNSEFAWPGASSWALNGRNSLMNPGPAMASHKEGEDRFFPLSGSLIFGKQGTGRDNVDADKVMITNEEEIKTTNPVATESYGQVATNHQSAQAQAQTGWVQNQGILPGMVWQDRDVYLQGPIWAKIPHTDGNFHPSPLMGGFGVKHPPPQILIKNTPVPADPPTAFNKDKLNSFITQYSTGQVSVEIEWELQKENSKRWNPEIQYTSNYYKSNNVEFAVNTEGVYSEPRPIGTRYLTRNL

SEQ ID NO: 754 - protein, 736 aa, synthetic construct
  REGION 1..736: note = Description of Artificial Sequence: Synthetic polypeptide
MAADGYLPDWLEDNLSEGIREWWALKPGAPQPKANQQHQDNARGLVLPGYKYLGPGNGLDKGEPVNAADAAALEHDKAYDQQLKAGDNPYLKYNHADAEFQERLKEDTSFGGNLGRAVFQAKKRLLEPLGLVEEAAKTAPGKKRPVEQSPQEPDSSAGIGKSGAQPAKKRLNFGQTGDTESVPDPQPIGEPPAAPSGVGSLTMASGGGAPVADNNEGADGVGSSSGNWHCDSQWLGDRVITTSTRTWALPTYNNHLYKQISNSTSGGSSNDNAYFGYSTPWGYFDFNRFHCHFSPRDWQRLTNNNWGFRPKRLNFKLFNIQVKEVTDNNGVKTIANNLTSTVQVFTDSDYQLPYVLGSAHEGCLPPFPADVFMIPQYGYLTLNDGSQAVGRSSFYCLEYIPSQMLRTGNNFQFSYEFENVPFHSSYAHSQSLDRLMNPLIDQYLYYLSKTINGSGQNQQTLKFSVAGPSNMAVQGRNYIPGPSYRQQRVSTTVTQNNNSEFAWPGASSWALNGRNSLMNPGPAMASHKEGEDRFFPLSGSLIFGKQGTGRDNVDADKVMITNEEEIKTTNPVATESYGQVATNHQSAQAQAQTGWVQNQGILPGMVWQDRDVYLQGPIWAKIPHTDGNFHPSPLMGGFGVKHPPPQILIKNTPVPADPPTAFNKDKLNSFITQYSTGQVSVEIEWELQKENSKRWNPEIQYTSNYYKSNNVEFAVNTEGVYSEPRPIGTRYLTRNL

SEQ ID NO: 755 - protein, 736 aa, synthetic construct
  REGION 1..736: note = Description of Artificial Sequence: Synthetic polypeptide
MAADGYLPDWLEDNLSEGIREWWALKPGAPQPKANQQHQDNARGLVLPGYKYLGPGNGLDKGEPVNAADAAALEHDKAYDQQLKAGDNPYLKYNHADAEFQERLKEDTSFGGNLGRAVFQAKKRLLEPLGLVEEAAKTAPGKKRPVEQSPQEPDSSAGIGKSGAQPAKKRLNFGQTGDTESVPDPQPIGEPPAAPSGVGSLTMASGGGAPVADNNEGADGVGSSSGNWHCDSQWLGDRVITTSTRTWALPTYNNHLYKQISNSTSGGSSNDNAYFGYSTPWGYFDFNRFHCHFSPRDWQRLINNNWGFRPKRLNFKLFNIQVKEVTDNNGVKTIANNLTSTVQVFTDSDYQLPYVLGSAHEGCLPPFPADVFMIPQYGYLTLNDGSQAVGRSSFYCLEYFPSQMLRTGNNFQFSYEFENVPFHSSYAHSQSLDRLMNPLIDQYLYYLSKTINGSGQNQQTLKFSVAGPSNMAVQGRNYIPGPSYRQQRVSTTVTQNNNSEFAWPGASSWALNGRNSLMNPGPAMASHKEGEDRFFPLSGSLISGKQGTGRDNVDANKVMITNEEEIKTTNPVATESYGQVATNHQSAQAQAQTGWVQNQGILPGMVWQDRDVYLQGPIWAKIPHTDGNFHPSPLMGGFEMKHPPPQILIKNTPVPADPPTAFNKDKLNSFITQYSTGQVSVEIEWELQKENSKRWNPEIQYTSNYYKSNNVEFAVNTEGVYSEPRPIGTRYLTRNL

SEQ ID NO: 756 - protein, 736 aa, synthetic construct
  REGION 1..736: note = Description of Artificial Sequence: Synthetic polypeptide
MAADGYLPDWLEDNLSEGIREWWALKPGAPQPKANQQHQDNARGLVLPGYKYLGPGNGLDKGEPVNAADAAALEHDKAYDQQLKAGDNPYLKYNHADAEFQERLKEDTSFGGNLGRAVFQAKKRLLEPLGLVEEAAKTAPGKKRPVEQSPQEPDSSAGIGKSGAQPAKKRLNFGQTGDTESVPDPQPIGEPPAAPSGVGSLTIASGGGAPVADNNEGADGVGSSSGNWHCDSQWLGDRVITTSTRTWALPTYNNHLYKRISNSTSGGSSNDNAYFGYSTPWGYFDFNRFHCHFSPRDWQRLINNNWGFRPKRLNFKLFNIRVKEVTDNNGVKTITNNLTSTVQVFTDSDYQLPYVLGSAHEGCLPPFPADVFMIPQYGYLTLNDGSQAVGRSSFYCLEYFPSQMLRTGNNFQFSYEFENVPFHSSYAHSQSLDRLMNPLIDQYLYYLSKTINGSGQNQQTLKFSVAGPSNMAVQGRNYIPGPSYRQQRVSTTVTRNNNSEFAWPGASSWALNGRNSLMNPGPAMASHKEGEDRFFPLSGSLIFGKQGTGRDNVDADKVMITNEEEIKTTNPVATESYGQVATNHQSAQAQAQTGWVQNQGILPGMVWQDRDVYLQGPIWAKIPHTDGNFHPSPLMGGFGVKHPPPQILIKNTPVPADPPTAFNKDKLNSFITQYSTGQVSVEIEWELQKENSKRWNPEIQYTSNYYKSNNVEFAVNTEGVYSEPRPIGTRYLTRNL

SEQ ID NO: 757 - protein, 736 aa, synthetic construct
  REGION 1..736: note = Description of Artificial Sequence: Synthetic polypeptide
MAADGYLPDWLEDNLSEGIREWWALKPGAPQPKANQQHQDNARGLVLPGYKYLGPGNGLDKGEPVNAADAAALEHDKAYDQQLKAGDNPYLKYNHADAEFQERLKEDTSFGGNLGRAVFQAKKRLLEPLGLVEEAAKTAPGKKRPVEQSPQEPDSSAGIGKSGAQPAKKRLNFGQTGDTEPVPDPQPIGEPPAAPSGVGSLTMASGGGAPVADNNEGADGVGSSSGNWHCDSQWLGDRVITTSTRTWALPTYNNHLYKQISNSTSGGSSNDNAYFGYSTPWGYFDFNRFHCHFSPRDWQRLINNNWGFRPKRLNFKLFNIQVKEVTDNNGVKTIANNLTSTVQVFTDSDYQLPYVLGSAHEGCLPPFPAGVFMIPQYGYLTLNDGSQAVGRSSFYCLEYFPSQMLRTGNNFQFSYEFENVPFHSSYAHSQSLDRLMNPLIDQYLYYLSKTINGSGQNQQTLKFSVAGPSNMAVQGRNYIPGPSYRQQRVSTTATQNNNSEFAWPGASSWALNGRNSLMNPGPAMASHKEGEDRFFPLSGSLIFGKQGTGRDNVDADKVMITNEEEIKTTNPVATESYGQVATNHQSAQAQAQTGWVQNQGILPGMVWQDRDVYLQGPIWAKIPHTDGNFHPSPLMGGFGMKHPPPQILIKNTPVPADPPTAFNKDKLNSFITQYSTGQVSVEIEWELQKENSKRWNPEIQYTSNYYKSNNVEFAVNTEGVYSEPRPIGTRYLTRNL

SEQ ID NO: 758 - protein, 736 aa, synthetic construct
  REGION 1..736: note = Description of Artificial Sequence: Synthetic polypeptide
MAADGYLPDWLEDNLSEGIREWWALKPGAPQPKANQQHQDNARGLVLPGYKYLGPGNGLDKGEPVNAADAAALEHDKAYDQQLKAGDNPYLKYNHADAGFQERLKEDTSFGGNLGRAVFQAKKRLLEPLGLVEEAAKTAPGKKRPVEQSPQEPDSSAGIGKSGAQPAKKRLNFGQTGDTESVPVPQPIGEPPAAPSGVGSLTMASGGGAPVADNNEGADGVGSSSGNWHCDSQWLGDRVITTSTRTWALPTYNNHLYKQISNSTSGGSSNDNAYFGYSTPWGYFDFNRFHCHFSPRDWQRLINNNWGFRPKRLNFKLFNIQVKEVTDNNGVKTIANNLTSTVQVFTDSDYQLPYVLGSAHEGCLPPFPADVFMIPQYGYLTLNDGSQAVGRSSFYCLEYFPSQMLRTGNNFQFSYEFENVPFHSSYAHSQSLDRLMNPLIDQYLYYLSKTINGSGQNQQTLKFSVAGPSNMAVQGRNYIPGPSYRQQRVSTTVTQNNNSEFAWPGASSWALNGRNSLMNPGPAMASHKEGEDRFFPLSGSLIFGKQGAGRDNVDADKVMITNEEEIKTTNPVATESYGQVATNHQSAQAQAQTGWVQNQGILPGMVWQDRDVYLQGPIWAKIPHTDGNFHPSPLMGGFGMKHPPPQILIKNTPVPADPPTAFNKDKLNSFITQYSTGQVSVEIEWELQKENSKRWNPEIQYTSNYYKSNNVEFAVNTEGVYSEPRPIGTRYLTRNL

SEQ ID NO: 759 - protein, 736 aa, synthetic construct
  REGION 1..736: note = Description of Artificial Sequence: Synthetic polypeptide
  VARIANT 126: note = MOD_RES - Any amino acid
MAADGYLPDWLEDNLSEGIRERWALKPGAPQPKANQQHQDNARGLVLPGYKYLGPGNGLDKGEPVNAADAAALEHDKAYDQQLKAGDNPYLKYNHADAEFQERLKEDTSFGGNLGRAVFQAKKRLXEPLGLVEEAAKTAPGKKRPVEQSPQEPDSSAGIGKSGAQPAKKRLNFGQTGDTESVPDPQPIGEPPAAPSGVGSLTMASGGGAPVADNNEGADGVGSSSGNWHCDSQWLGDRVITTSTRTWALPTYNNHLYKQISNSTSGGSSNDNAYFGYSTPWGYFDFNRFHCHFSPRDWQRLINNNWGFRPKRLNFKLFNIQVKEVTDNNGVKTIANNLTSTVQVFTDSDYQLPYVLGSAHEGCLPPFPADVFMIPQYGYLTLNDGSQAVGRSSFYCLEYFPSQMLRTGNNFQFSYEFENVPFHSSYAHSQSPDRLMNPLIDQYLYYLSKTINGSGQNQQTLKFSVAGPSNMAVQGRNYIPGPSYRQQRVSTTVTQNNNSEFAWPGASSWALNGRNSLMNPGPAMASHKEGEDRFFPLSGSLIFGKQGTGRDNVDADKVMITNEEEIKTTNPVATESYGQVATNHQSAQAQAQTGWVQNQGILPGMVWQDRDVYLQGPIWAKIPHTDGNFHPSPLMGGFGVKHPPPQILIKNTPVPADPPTAFNKDKLNSFITQYSTGQVSVEIEWELQKENSKRWNPEIQYTSNYYKSNNVEFAVNTEGVYSEPRPIGTRYLTRNL

SEQ ID NO: 760 - protein, 736 aa, synthetic construct
  REGION 1..736: note = Description of Artificial Sequence: Synthetic polypeptide
MAADGYLPDWLEDNLSEGIREWWALKPGAPQPKANQQHQDNARGLVLPGYKYLGPGNGLDKGEPVNAADAAALEHDKAYDQQLKAGDNPYLKYNHADAEFQERLKEDTSFGGNLGRAVFQAKKRLLEPLGLVEEAAKTAPGKKRPVEQSPQEPDSSAGIGKSGAQPAKKRLNFGQTGDTESVPDPQPIGEPPAAPSGVGSLTMASGGGAPVADNNEGADGVGSSSGNWHCDSQWLGDRVITTSTRTWALPTYNNHLYKQISNSTSGGSSNDNAYLGYSTPWGYFDFNRFHCHFSPRDWQRLINNNWGFRPKRLNFKLFNIQVKEVTDNNGVKTIANNLTSTVQVFTDSDYQLPYVLGSAHEGCLPPFPADVFMIPQYGYLTLNDGSQAVGRSSFYCLEYFPSQMLRTGNNFQFSYEFENVPFHSSYAHSQSLDRLMNPLIDQYLYYLSKTINGSGQNQQTLKFSVAGPSNMAVQGRNYIPGPSYRQQRVSTTVTQNNNSEFAWPGASSWALNGRNSLMNPGPAMASHKEGEDRFFPLSGSLIFGKQGTGRDNVDADKVMITNEEEIKTTNPVATESYGQVATNHQSAQAQAQTGWVQNQGILPGMVWQDRDVYLQGPIWAKIPHTDGNFHPSPLMGGFGMKHPPPQILIKNTPVPADPPTAFNKDKLNSFITQYSTGQVSVEIEWELQKENSKRWNPEIQYTSNYYKSNNVEFAVNTEGVYSEPRPIGTRYLTRNL

SEQ ID NO: 761 - protein, 736 aa, synthetic construct
  REGION 1..736: note = Description of Artificial Sequence: Synthetic polypeptide
MAADGYLPDWLEDNLSEGIREWWALKPGAPQPKANQQHQDNARGLVLPGYKYLGPGNGLDKGEPVNAADAAALEHDKAYDQQLKAGDNPYLKYNHADAEFQERLKEDTSFGGNLGRAVFQAKKRLLEPLGLVEEAAKTAPGKKRPVEQSPQEPDSSAGIGKSGAQPAKKRLNFGQTGDTESVPDPQPIGEPPAAPSGVGSLTMASGGGAPVADNNEGADGVGSSSGNWHCDSQWLGDRVITTSTRTWALPTYNNHLYKQISNSTSGGSSNDNAYFGYSTPWGYFDFNRFHCHFSPRDWQRLINNNWGFRPKRLNFKLFNIQVKEVTDNNGVKTIANNLTSTVQVFTDSDYQLPYVLGSAHEGCLPPFPADVFMIPQYGYLTLNDGSQAVGRSSFYCLEYFPSQMLRTGNNFQFSYEFENVPFHSSYAHSQSLDRLMNPLIDQYLYYLSKTINGSGQNQQTLKFSVAGPSNMAVQGRNYIPGPSYRQQRVSTTVTQNNNSEFAWPGASSWALNGRNSLMNPGPAMASHKEGEDRFFPLSGSLIFGKQGTGRDNVDADKVMITNEEEIKTTNPVATESYGQVATNHQSAQAQAQTGWVQNQGILPGMVWQDRDVYLQGPIWAKIPHTDGNFHPSPLMGGFGMKHPPPQILIKNTPVPADPPTAFNKDKLDSFITQYSTGQVSVEIEWELQKENSKRWNPVIQYTSNYYKSNNVEFAVNTEGVYSEPRPIGTRYLTRNL

SEQ ID NO: 762 - protein, 736 aa, synthetic construct
  REGION 1..736: note = Description of Artificial Sequence: Synthetic polypeptide
MAADGYLPDWLEDNLSEGIREWWDLKPGAPKPKANQQKQDDGRGLVLPGYKYLGPFNGLDKGEPVNAADAAALEHDKAYDQQLKAGDNPYLRYNHADAEFQERLQEDTSFGGNLGRAVFQAKKRVLEPLGLVEEGAKTAPGKKRPVEQSPQEPDSSSGIGKTGQQPAKKRLNFGQTGDSESVPDPQPLGEPPATPAAVGPTTMASGGGAPMADNNEGVDGVGNASGNWHCDSTWLGDRVITTSTRTWALPTYNNHLYKQISSASTGASNDNHYFGYSTPWGYFDFNRFHCHFSPRDWQRLINNNWGFRPKRLNFKLFNIQVKEVTTNDGVTTIANNLTSTVQVFSDSEYQLPYVLGSAHQGCLPPFPADVFMIPQYGYLTLNNGSQAVGRSSFYCLEYFPSQMLRTGNNFTFSYTFEEVPFHSSYAHSQSLDRLMNPLIDQYLYYLNRTQNQSGSAQNKDLLFSRGSPAGMSVQPKNWLPGPCYRQQRVSKTKTDNNNSNFTWTGASKYNLNGRESIINPGTAMASHKDDEDKFFPMSGVMIFGKESAGASNTALDNVMITDEEEIKATNPVATERFGTVAVNFQSSSTDPATGDVHAMGALPGMVWQDRDVYLQGPIWAKIPHTDGHFHPSPLMGGFGLKNPPPQILIKNTPVPANPPAEFSATKLASFITQYSTGQVSVEIEWELQKENSKRWNPEVQYTSNYAKSANVDFTVDNNGLYTEPRPIGTRYLTRPL

SEQ ID NO: 763 - protein, 736 aa, synthetic construct
  REGION 1..736: note = Description of Artificial Sequence: Synthetic polypeptide
MAADGYLPDWLEDNLSEGIREWWDLKPGAPKPKANQQKQDDGRGLVLPGYKYLGPFNGLDKGEPVNAADAAALEHDKAYDQQLKAGDNPYLRYNHADAEFQERLQEDTSFGGNLGRAVFQAKKRVLEPLGLVEEGAKTAPGKRRPVEQSPQEPDSSSGIGKTGQQPAKKRLNFGQTGDSESVPDPQPLGEPPATPAAVGPTTMASGGGAPMADNNEGADGVGNASGNWHCDSTWLGDRVITTSTRTWALPTYNNHLYKQISSASTGASNDNHYFGYSTPWGYFDFNRFHCHFSPRDWQRLINNNWGFRPKRLNFKLFNIQVKEVTTNDGVTTIANNLTSTVQVFSDSEYQLPYVLGSAHQGCLPPFPADVFMIPQYGYLTLNNGSQAVGRSSFYCLEYFPSQMLRTGNNFTFSYTFEEVPFHSSYAHSQSLDRLMNPLIDQYLYYLNRTQNQSGSAQNKDLLFSRGSPAGMSVQPKNWLPGPCYRQQRVSKTKTDNNNSNFTWTGASKYNLNGRESIINPGTAMASHKDDEDKFFPMSGVMIFGKESAGASNTALDNVMITDEEEIKATNPVATERFGTVAVNFQSSSTDPATGDVHAMGALPGMVWQDRDVYLQGPIWAKIPHTDGHFHPSPLMGGFGLKNPPPQILIKNTPVPANPPAEFSATKFASFITQYSTGQVSVEIEWELQKENSKRWNPEVQYTSNYAKSANVDFTVDNNGLYTEPRPIGTRYLTRPL

SEQ ID NO: 764 - protein, 736 aa, synthetic construct
  REGION 1..736: note = Description of Artificial Sequence: Synthetic polypeptide
MAADGYLPDWLEDNLSEGIREWWDLKPGAPKPKANQQKQDDGRGLVLPGYKYLGPFNGLDKGEPVNAADAAALEHDKAYDQQLKAGDNPYPRYNHADAEFQERLQEDTSFGGNLGRAVFQAKKRVLEPLGLVGEGAKTAPGKKRPVEQSPQEPDSSSGIGKTGQQPAKKRLNFGQTGDSESVPDPQPLGEPPATPAAVGPTTMASGGGAPMADNNEGADGVGNASGNWHCDSTWLGDRVITTSTRTWALPTYNNHLYKQISSASTGASNDNHYFGYSTPWGYFDFNRFHCHFSPRDWQRLINNNWGFRPKRLNFKLFNIQVKEVTTNDGVTTIANNLTSTVQVFSDSEYQLPYVLGSAHQGCLPPFPADVFMIPQYGYLTLNNGSQAVGRSSFYCLEYFPSQMLRTGNNFTFSYTFEEVPFHSSYAHSQSLDRLMNPPIDQYLYYLNRTQNQSGSAQNKDLLFSRGSPAGMSVQPKNWLPGPCYRQQRVSKTKTDNNNSNFTWTGASKYNLNGRESIINPGTAMASHKDDEDKFFPMSGVMIFGKESAGASNTALDNVMITDEEEIKATNPVATERFGTVAVNFQSSSTDPATGDVHAMGALPGMVWQDRDVYLQGPIWAKIPHTDGHFHPSPLMGGFGLKNPPPQILIKNTPVPANPPAEFSATKFASFITQYSTGQVSVEIEWELQKENSKRWNPEVQYTSNYAKSANVDFTVDNNGLYTEPRPIGTRYLTRPL

SEQ ID NO: 765 - protein, 736 aa, synthetic construct
  REGION 1..736: note = Description of Artificial Sequence: Synthetic polypeptide
MAADGYLPDWLEDNLSEGIREWWDLKPGAPKPKANQQKQDDGRGLVLPGYKYLGPFNGLDKGEPVNAADAAALEHDKAYDQQLKAGDNPYLRYNHADAEFQERLQEDTSFGGNLGRAVFQAKKRVLEPLGLVEEGAKTAPGKKRPVEQSPQEPDSSSGIGKTGQQPAKKRLNFGQTGDSESVPDPRPLGEPPATPAAVGPTTMASGGGAPMADNNEGADGVGNASGNWHCDSTWLGDRVITTSTRTWALPTYNNHLYKQISSASTGASNDNHYFGYSTPWGYFDFNRFHCHFSPRDWQRLINNNWGFRPKRLNFKLFNIQVKEVTTNDGVTTIANNLTSTVQVFSDSEYQLPYVLGSAHQGCLPPFPADVFMIPQYGYLTLNNGSQAVGRSSFYCLEYFPSQMLRTGNNFTFSYTFEEVPFHSSYAHSQSLDRLMNPLIDQYLYYLNRTQNQSGSAQNKDLLFSRGPPAGMSVQPKNWLPGPCYRQQRVSKTKTDNNNSNFTWTGASKYNLNGRESIINPGTAMASHKDDEDKFFPMSGVMIFGKESAGASNTALDNVMITDEEEIKATNPVATERFGTVAVNFQSSSTDPATGDVHAMGALPGMVWQDRDVYLQGPIWAKIPHTDGHFHPSPLMGGFGLKNPPPQILIKNTPVPANPPAEFSATKFASFITQYSTGQVSVEIEWELQKENSKRWNPEVQYTSNYAKSANVDFTVDNNGLYTEPRPIGTRYLTRPL

SEQ ID NO: 766 - protein, 736 aa, synthetic construct
  REGION 1..736: note = Description of Artificial Sequence: Synthetic polypeptide
MAADGYLPDWLEDNLSEGIREWWDLKPGAPKPKANQQKQDDGRGLVLPGYKYLGPFNGLDKGEPVNAADAAALEHDKAYDQQLKAGDNPYLRYNHADAEFQERLQEDTSFGGNLGRAVFQAKKRVLEPLGLVEEGAKTAPGKKRPVEQSPQEPDSSSGIGKTGQQPAKKRLNFGQTGGSESVPDPQPLGEPPATPAAVGPTTMASGGGAPMADNNEGADGVGNASGNWHCDSTWLGDRVITTSTRTWALPTYNNHLYKQISSASTGASNDNHYFGYSTPWGYFDFNRFHCHFSPRDWQRLINNNWGFRPKRLNFKLFNIQVKEVTTNDGVTTIANNLTSTVQVFSDSEYQLPYVLGSAHQGCLPPFPADVFMIPQYGYLTLNNGSQAVGRSSFYCLEYFPSQMLRTGNNFTFSYTFEEVPFHSSYAHSQSLDRLMNPPIDQYLYYLNRTQNQSGSAQNKDLLFSRGSPAGMSVQPKNWLPGPCYRQQRVSKTKTDNNNSNFTWTGASKYNLNGRESIINPGTAMASHKDDEDKFFPMSGVMIFGKESAGASNTALDNVMITDEEEIKATNPVATERFGTVAVNFQSSSTDPATGDVHAMGALPGMVWQDRDVYLQGPIWAKIPHTDGHFHPSPLMGGFGLKNPPPQILIKNTPVPANPPAEFSATKFASFITQYSTGQVSVEIEWELQKENSKRWNPEVQYTSNYAKSANVDFTVDNNGLYTEPRPIGTRYLTRPL

SEQ ID NO: 767 - protein, 736 aa, synthetic construct
  REGION 1..736: note = Description of Artificial Sequence: Synthetic polypeptide
MAADGYLPDWLEDNLSEGIREWWDLKPGAPKPKANQQKQDDGRGLVLPGYKYLGPFNGLDKGEPVNAADAAALEHDKAYDQQLKAGDNPYLRYNHADAEFQERLQEDTSFGGNLGRAVFQAKKRVLEPLGLVEEGAKTAPGKKRPVEQSPQEPDSSSGIGKTGQQPAKKRLNFGQTGDSESVPDPQPLGEPPATPAAVGPTTMASGGGAPMADNNEGADGVGNASGNWHCDSTWLGDRVITTSTRTWALPTYNNHLYKQISSASTGASNDNHYFGYSTPWGYFDFNRFHCHFSPRDWQRLINNNWGFRPKRLNFKLFNIQVKEVTTNDGVTTIANNLTSTVQVFSDSEYQLPYVLGSAHQGCLPPFPADVFMIPQYGYLTLNNGSQAVGRSSFYCLEYFPSQMLRTGNNFTFSYTFEEVPFHSSYAHSQSLDRLMNPLIDQYLYYLNRTQNQSGSAQNKDLLFSRGSPAGMSVQPKNWLPGPCYRQQRVSKTKTDNNNSNFTWTGASKYNLNGRESIINPGTAVASHKDDEDKFFPMSGVMIFGKESAGASNTALDNVMITDEEEIKATNPVATERFGTVAVNFQSSSTDPATGDVHAMGALPGMVWQDRDVYLQGPIWAKIPHTDGHFHPSPLMGGFGLKNPPPQILIKNTPVPANPPAEFSATKFASFITQYSTGQVSVEIEWELQKENSKRWNPEVQYTSNYAKSANVDFTVDNNGLYTEPRPIGTRYLTRPL

SEQ ID NO: 768 - protein, 736 aa, synthetic construct
  REGION 1..736: note = Description of Artificial Sequence: Synthetic polypeptide
MAADGYLPDWLEDNLSEGIREWWDLKPGAPKPKANQQKQDDGRGLVLPGYKYLGPFNGLDKGEPVNAADAAALEHDKAYDQQLKAGDNPYLRYNHADAEFQERLQEDTSFGGNLGRAVFQAKKRVLEPLGLVEEGAKTAPGKKRPVEQSPQEPDSSSGIGKTGQQPAKKRLNFGQTGDSESVPDPQPLGEPPATPAAVGPTTMASGGGAPMADNNEGADGVGNASGNWHCDSTWLGDRVITTSTRTWALPTYNNHLYKQISSASTGASNDNHYFGYSTPWGYFDFNRFHCHFSPRDWQQLINNNWGFRPKRLNFKLFNIQVKEVTTNDGVTTIANNLTSTVQVFSDSEYQLPYVLGSAHQGCLPPFPADVFMIPQYGYLTLNNGSQAVGRSSFYCLEYFPSQMLRTGNNFTFSYTFEEVPFHSSYAHSQSLDRLMNPLIDQYLYYLNRTQNQSGSAQNKDLLFSRGSPAGMSVQPKNWLPGPCYRQQRVSKTKTDNNNSNFTWTGASKYNLNGRESIINPGTAMASHKDDEDKFFPMSGVMIFGKESAGASNTALDNVMITDEEEIKATNPVATERFGTVAVNFQSTSTDPATGDVHAMGALPGMVWQDRDVYLQGPIWAKIPHTDGHFHPSPLMGGFGLKNPPPQILIKNTPVPANPPAEFSATKFASFITQYSTGQVSVEIEWELQKENSKRWNPEVQYTSNYAKSADVDFTVDNNGLYTEPRPIGTRYLTRPL

SEQ ID NO: 769 - protein, 736 aa, synthetic construct
  REGION 1..736: note = Description of Artificial Sequence: Synthetic polypeptide
MAADGYLPDWLEDNLSEGIREWWDLKPGAPKPKANQQKQDDGRGLVLPGYKYLGPFNGLDKGEPVNAADAAALEHDKAYDQQLKAGDNPYLRYNHADAEFQERLQEDTSFGGNLGRAVFQAKKRVLEPLGLVEEGAKTAPGKKRPVEQSPQEPDSSSGIGKTGQQPAKKRLNFGQTGDSESVPDPQPLGEPPATPAAVGPTTMASGGGAPMADNNEGADGVGNASGNWHCDSTWLGDRVITTSTRTWALPTYNNHLYKQISSASTGASNDNHYFGYSTPWGYFDFNRFHCHFSPRDWQRLINNNWGFRPKRLNFKLFNIQVKEVTTNDGVTTIANNLTSTVQVFSDSEYQPPYVLGSAHQGCLPPFPADVFMIPQYGHLTLNNGSQAVGRSSFYCLEYFPSQMLRTGNNFTFSYTFEEVPFHSSYAHSQSLDRLTNPLIDQYLYYLNRTQNQSGSAQNKDLLFSRGSPAGMSVQPKNWLPGPCYRQQRVSKTKTDNNNSNFTWTGASKYNLNGRESIINPGTAMASHKDDEDKFFPMSGVMIFGKESAGASNTALDNVMITDEEEIKATNPVATERFGTVAVNFQSSSTDPATGDVHAMGALPGMVWQDRDVYLQGPIWAKIPHTDGHFHPSPLMGGFGLKNPPPQILIKNTPVPANPPAEFSATKFASFITQYSTGQVSVEIEWELQKENSKRWNPEVQYTSNYAKSANVDFTVDNNGLYTEPRPIGTRYLTRPL

SEQ ID NO: 770 - protein, 736 aa, synthetic construct
  REGION 1..736: note = Description of Artificial Sequence: Synthetic polypeptide
MAADGYLPDWLEDNLSEGIREWWDLKPGAPKPKANQQEQDDGRGLVLPGYKYLGPFNGLDKGEPVNAADAAALEHDKAYDQQLKAGDNPYLRYNHADAEFQERLQEDTSFGGNLGRAVFQAKKRVLEPLGLVEEGAKTAPGKKRPVEQSPQEPDSSSGIGKTGQQPAKKRLNFGQTGDSESVPDPQPLGEPPATPAAVGPTTMASGGGAPMADNNEGADGVGNASGNWHCDSTWLGDRVITTSTRTWALPTYNNHLYKQISSASTGASNDNHYFGYSTPWGYFDFNRFHCHFSPRDWQRLINNNWGFRPKRLNFKLFNIQVKEVTTNDGVTTIANNLTSTVQVFSDSEYQLPYVLGSAHQGCLPPFPADVFMIPQYGYLTLNNGSQAVGRSSFYCLEYFPSQMLRTGNNFTFSYTFEEVPFHSSYAHSQSLDRLMNPLIDQYLYYLNRTQNQSGSAQNKDLLFSRGSPAGMSVQPKNWLPGPCYRQQRVSKTKTDNNNSNFTWTGASKYNLNGRESIINPGTAMASHKDDEDKFFPMSGVMIFGKESAGASNTALDNVMITDEEEIKATNPVATERFGTVAVNFQSSSTDPATGDVHATGTLPGMVWQDRDVYLQGPIWAKIPHTDGHFHPSPLMGGFGLKNPPPQILIKTTPVPANPPAEFSATKFASFITQYSTGQVSVEIEWELQKENSKRWNPEVQYTSNYAKSANVDFTVDDNGLYTEPRPIGTRYLTRPL

SEQ ID NO: 771 - protein, 736 aa, synthetic construct
  REGION 1..736: note = Description of Artificial Sequence: Synthetic polypeptide
MAADGYLPDWLEDNLSEGIREWWDLKPGAPKPKANQQKQDDGRGLVLPGYKYLGPFNGLDKGEPVNAADAAALEHDKAYDQQLKAGDNPYLRYNHADAEFQERLQEDTSFGGNLGRAVFQAKKRVLEPLGLVEEGAKTAPGKKRPVEQSLQEPDSSSGIGKTGQQPAKKRLNFGQTGDSESVPDPQPLGEPPATPAAVGPTTMASGGGAPMADNNEGADGVGNASGNWHCDSTWLGDRVITTSTRTWALPTYNNHLYKQISSASTGASNDNHYFGYSTPWGYFDFNRFHCHFSPRDWQRLINNNWGFRPKRLNFKLFNIQVKEVTTNDGVTTIANNLTSTVQVFSDSEYQLPYVLGSAHQGCLPPFPADVFMIPQYGYLTLNNGSQAVGRSSFYCLEYFPSQMLRTGNNFTFSYTFEEVPFHSSYAHSQSLDRLMNPLIDQYLYYLNRTQNQSGSAQNKDLLFSRGSPAGMSVQPKNWLPGPCYRQQRVSKTKTDNDNSNFTWTGASKYNLNGRESIINPGTAMASHKDDEDKFFPMSGVMIFGKESAGASNTALDNVMITDEEEIKATNPVATERFGTVAVNFQSSSTDPATGDVHAMGALPGMVWQDRDVYLQGPIWAKIPHTDGHFHPSPLMGGFGLKNPPPQILIKNTPVPANPPAEFSATKFASFITQYSTGQVSVEIEWELQKENSKRWNPEVQYTSNYAKSANVDFTVDNNGLYTEPRPIGTRYLTRPL

SEQ ID NO: 772 - protein, 736 aa, synthetic construct
  REGION 1..736: note = Description of Artificial Sequence: Synthetic polypeptide
MAADGYLPDWLEDNLSEGIREWWDLKPGAPKPKANQQKQDDGRGLVLPGYKYLGPFNGLDKGEPVNAADAAALEHDKAYDQQLKAGDNPYLRYNHADAEFQERLQEDTSFGGNLGRAVFQAKKRVLEPLGLVEEGAKTAPGKKRPVEQSPQEPDSSSGIGKTGQQPAKKRLNFGQTGDSESVPDPQPLGEPPATPAAVGPTTMASGGGAPMADNNEGADGVGNASGNWHCDSTWLGDRVITTSTRTWALPTYNNHLYKQISSASTGASNDNHYFGYSTPWGYFDFNRFHCHFSPRDWQRLINNNWGFRPKRLNFKLFNIQVKEVTTNDGVTTIANNLTSTVQVFSDSEYQLPYVLGSAHQGCLPPFPADVFMIPQYGYLTLNNGSQAVGRSSFYCLEYFPSQMLRTGNNFTFSYTFEEAPFHSSYAHSQSLDRLMNPLIDQYLYYLNRTQNQSGSAQNKDLLFSRGSPAGMSVQPKNWLPGPCYRQQRVSKTKTDNNNSNFTWTGASKYNLNGRESIINPGTAMASHKDDEDKFFPMSGVMIFGKESAGASNTALDNVMITDEEEIKATNPVATERFGTVAVNFQSSSTDPATGDVHAMGALPGMVWQDRDVYLQGPIWAKIPHTDGHFHPSPLMGGFGLKNPPPQILIKNTPVPANPPAEFSATKFASFITQYSTGQVSVEIEWELQKENSKRWNPEVQYTSNYAKSANVDFTVDNNGLYTEPRPVGTRYLTRPL

SEQ ID NO: 773 - protein, 736 aa, synthetic construct
  REGION 1..736: note = Description of Artificial Sequence: Synthetic polypeptide
MAADGYLPDWLEDNLSEGIREWWDLKPGAPKPKANQQKQDDGRGLVLPGYKYLGPFNGLDKGEPVNAADAAALEHDKAYDQQLKAGDNPYLRYNHADAEFQERLQENTSFGGNLGRAVFQAKKRVLEPLGLVEEGAKTAPGKKRPVEQSPQEPDSSSGIGKTGQQPAKKRLNFGQTGDSESVPDPQPLGEPPATPAAVGPTTMASGGGAPMADNNEGADGVGNASGNWHCDSTWLGDRVITTSTRTWALPTYNNHLYKQISSASTGASNDNHYFGYSTPWGYFDFNRFHCHFPPRDWQRLINNNWGFRPKRLNFKLFNIQVKEVTSNDGVTTIANNLTSTVQVFSDSEYQLPYVLGSAHQGCLPPFPADVFMIPQYGYLTLNNGSQAVGRSSFYCLEYFPSQMLRTGNNFTFSYTFEEVPFHSSYAHSQSLDRLMNPLIDQYLYYLNRTQNQSGSAQNKDLLFSRGSPAGMSVQPKNWLPGPCYRQQRVSKTKTDNNNSNFTWTGASKYNLNGRESIINPGTAMASHKDDEDKFFPMSGVMIFGKESAGASNTALDNVMITDEEEIKATNPVATERFGTVAVNFQSSSTDPATGDVHAMGALPGMVWQDRDVYLQGPIWAKIPHTDGHFHPSPLMGGFGLKNPPPQILIKNTPVPANPPAEFSATKFASFITQYSTGQVSVEIEWELQKENSKRWNPEVQYTSNYAKSANVDFTVDNNGLYTEPRPIGTRYLTRPL

SEQ ID NO: 774 - protein, 736 aa, synthetic construct
  REGION 1..736: note = Description of Artificial Sequence: Synthetic polypeptide
MAADGYLPDWLEDNLSEGIREWWDLKPGAPKPKANQQKQDDGRGLVLPGYKYLGPFNGLDKGEPVNAADAAALEHDKAYDQQLKAGDNPYLRYNHADAEFQERLQEDTSFGGNLGRAVFQAKKRVLEPLGLVEEGAKTAPGKKRPVEQSPQEPDSSSGIGKTGQQPAKKRLNFGQTGDSESVPDPQPLGEPPATPAAVGPTTMASGGGAPMADNNEGADGVGNASGNWHCDSTWLGDRVITTSTRTWALPTYNNHLYKQISSASTGASNDNHYFGYSTPWGYFDFNRFHCHFSPRDWQRLINNNWGFRPKRLNFKLFNIQVKEVTTNDGVTTIANNLTSTVQVFSDSEYQLPYVLGSAHQGCLPPFPADVFMIPQYGYLTLNNGSQAVGRSSFYCLEYFPSQMLRTGNNFTFSYTFEEVPFHSSYAHSQSLDRLMNPLIDQYLYYLNRTQNQSGSAQNKDLLFSRGSPAGTSVQPKNWLPGPCYRQQRVSKTKTDNNNSNFTWTGASKYNLNGRESIINPGTAMASHKDDEDKFFPMSGVMIFGKESAGASNTALDNVMITDEEEIKATNPVATERFGTVAVNFQSSSTDPATGDVHAMGALPGMVWQDRDVYLQGPIWAKIPHTDGHFHPSPLMGGFGLKNPPPQILIKNTPVPANPPAEFSATKFASFITQYSTGQVSVEIEWELQKENSKRWNPEVQYTSNYAKSANVDFTVDNNGLYTGPRPIGTRYLTRPL

SEQ ID NO: 775 - protein, 736 aa, synthetic construct
  REGION 1..736: note = Description of Artificial Sequence: Synthetic polypeptide
MAADGYLPDWLEDNLSEGIREWWDLKPGAPKPKANQQKQDDGRGLVLPGYKYLGPFNGLDKGEPVNAADAAALEHDKAYDQQLKAGDNPYLRYNHADAEFQERLQEDTSFGGNLGRAVFQAKKRVLEPLGLVEEGAKTAPGKKRPVEQSPQEPDSSSGIGKTGQQPAKKRLNFGQTGDSESVPDPQPLGEPPATPAAVGPTTMASGGGAPMADNNEGADGVGNAPGNWHCDSTWLGDRVITTSTRTWALPTYNNHLYKQISSASTGASNDNHYFGYSTPWGYFDFNRFHCHFSPRDWQRLINNNWGFRPKRLNFKLFNIQVKEVTTNDGVTTIANNLTSTVQVFSDSEYQLPYVLGSAHQGCLPPFPADVFMIPQYGYLTLNNGSQAVGRSSFYCLEYFPSQMLRTGNNFTFSYTFEEVPFHSSYAHSQSLDRLMNPLIDQYLYYLNRTQNQSGSAQNKDLLFSRGSPAGMSVQPKNWLPGPCYRQQRVSKTKTDNNNSNFTWTGASKYNLNGRESIINPGTAMASHKDDEDKFFPMSGVMIFGKESAGASNTALDNVMITGEEEIKATNPVATERFGTVAVNFQSSSTDPATGDVHAMGALPGMVWQDRDVYLQGPIWAKIPHTDGHFHPSPLMGGFGLKNPPPQILIKNTPVPANPPAEFSATKFASFITQYSTGQVSVEIEWELQKENSKRWNPEVQYTSNYAKSANVDFTVDNNGLYTEPRPIGTRYLTRPL

SEQ ID NO: 776 - protein, 736 aa, synthetic construct
  REGION 1..736: note = Description of Artificial Sequence: Synthetic polypeptide
MAADGYLPDWLEDNLSEGIREWWDLKPGAPKPKANQQKQDDGRGLVLPGYKYLGPFNRLDKGEPVNAADAAALEHDKAYDQQLKAGDNPYLRYNHADAEFQERLQEDTSFGGNLGRAVFQAKKRVLEPLGLVEEGAKTAPGRKRPVEQSPQEPDSSSGIGKTGQQPAKKRLNFGQTGDSESVPDPQPLGEPPATPAAVGPTTMASGGGAPMADNNEGADGVGNASGNWHCDSTWLGDRVITTSTRTWALPTYNNHLYKQISSASTGASNDNHYFGYSTPWGYFDFNRFHCHFSPRDWQRLINNNWGFRPKRLNFKLFNIQVKEVTTNDGVTTIANNLTSTVQVFSDSEYQLPYVLGSAHQGCLPPFPADVFMIPQYGYLTLNNGGQAVGRSSFYCLEYFPSQMLRTGNNFTFSYTFEEVPFHSSYAHSQSLDRLMNPLIDQYLYYLNRTQNQSGSAQNKDLLFSRGSPAGMSVQPKNWLPGPCYRQQRVSKTKTDNNNSNFTWTGASKYSLNGRESIINPGTAMASHKDDEDKFFPMGGVMIFGKESAGASNTALDNAMITDEEEIKATNPVATERFGTVAVNFQSSSTDPATGDVHAMGALPGMVWQDRDVYLQGPIWAKIPHTDGHFHPSPLMGGFGLKNPPPQILIKNTPVPANPPAEFSATKFASFITQYSTGQVSVEIEWELQKENSKRWNPEVQYTSNYAKSANVDFTVDNNGLYTEPRPIGTRYLTRPL

SEQ ID NO: 777 - protein, 736 aa, synthetic construct
  REGION 1..736: note = Description of Artificial Sequence: Synthetic polypeptide
MAADGYLPDWLEDNLSEGIREWWDLKPGAPKPKANQQKQDDGRGLVLPGYKYLGPFNGLDKGEPVNAADAAALEHDKAYDQQLKAGDNPYLRYNHADAEFQERLQEDTSFGGNLGRAVFQAKKRVLEPLGLVEEGAKTAPGKKRPVEQSPQEPDSSSGIGKTGQQPAKKRLNFGQTGDSESVPDPQPLGEPPATPAAVGPTTMASGGGAPMADNNEGADGVGNASGNWHCDSTWLGGRVITTSTRTWALPTYNNHLYKQISSASTGASNDNHYFGYSTPWGYFDFNRFHCHFSPRDWQRLINNNWGFRPKRLNFKLFNIQVKEVTTNDGVTTIANNLTSTVQVFSDSEYQLPYVLGSAHQGCLPPFPADVFMIPQYGYLTLNNGSQAVGRSSFYCLEYFPSQMLRTGNNSTFSYTFEEVPFHSSYAHSQSLDRLMNPLIDQYLYYLNRTQNQSGSAQNKDLLFSRGSPAGMSVQPKNWLPGPCYRQQRVSKTKTDNNNSNFTWTGASKYNLNGRESIINPGTAMASHKDDEDKFFPMSGVMIFGKESAGASNTALDNVMITDEEEIKATNPVATERFGTVAVNFQSSSTDPATGDVHAMGTLPGMVWQDRDVYLQGPIWAKIPHTDGHFHPSPLMGGFGLKNPPPQILIKNTPVPANPPAEFSATKFASFITQYSTGQVSVEIEWELQKENSKRWNPEVQYTSNYAKSANVDFTVDNNGLYTEPRPIGTRYLTRPL

SEQ ID NO: 778 - protein, 736 aa, synthetic construct
  REGION 1..736: note = Description of Artificial Sequence: Synthetic polypeptide
MAADGYLPDWLEDNLSEGIREWWDLKPGAPKPKANQQKQDDGRGLVLPGYKYLGPFNGLDKGEPVSAADAAALEHDKAYDQQLKAGDNPYLRYNHADAEFQERLQEDTSFGGNLGRAVFQAKKRVLEPLGLVEEGAKTAPGKKRPVEQSPQEPDSSSGIGKTGQQPAKERLNFGQTGDSESVPDPQPLGEPPATPAAVGPTTMASGGGAPMADNNEGADGVGNASGNWHCDSTWLGDRVITTSTRTWALPTYNNHLYKQISSASTGASNDNHYFGYSTPWGYFDFNRFHCHFSPRDWQRLINNNWGFRPKRLNFKLFNIQVKEVTTNDGVTTIANNLTSTVQVFSDSEYQLPYVLGSAHQGCLPPFPADVFMIPQYGYLTLNNGSQAVGRSSFYCLEYFPSQMLRTGNNFTFSYTFEEVPFHSSYAHSQSLDRLMNPLIDQYLYYLNRTQNQSGSAQNKDLLFSRGSPAGMSVQPKNWLPGPCYRQQRVSKTKTDNNNSNFTWTGASKYNLNGRESIINPGTAMASHKDDEDKFFPMSGVMIFGKESAGASNTALDNVMITDEEEIKATNPVATERFGTVAVNFQSSSTDPATGDVHAMGALPGMVWQDRDVYLQGPIWAKIPHTDGHFHPSPLMGGFGLKNPPPQILIKNTPVPANPPAEFSATKFASFITQYSTGQVSVEIEWELQKENSKRWNPEVQYTSNYAKSANVDFTVDNNGLYTEPRPIGTRYLTRPL

SEQ ID NO: 779 - protein, 736 aa, synthetic construct
  REGION 1..736: note = Description of Artificial Sequence: Synthetic polypeptide
MAADGYLPDWLEDNLSEGIREWWDLKPGAPKPKANQQKQDDGRGLVLPGYKYLGPFNGLDKGEPVNAADAAALEHDKAYDQQLKAGDNPYLRYNHADAEFQERLQEDTSFGGNLGRAVFQAKKRVLEPLGLVEEGAKTAPGKKRPVEQSPQEPDSSSGIGKTGQQPAKKRLNFGQTGDSESVPDPQPLGEPPATPAAVGPTTMASGGGAPMADNNEGADGVGNASGNWHCDSTWLGDRVITTSTRTWALPTYNNHLYKQISSASTGASNDNHYFGYSTPWGYFDFNRFHCHFSPRDWQRLINNNWGFRPKRLNFKLFNIQVKEVTTNDGVTTIANNLTSTVQVFSDSEYQLPYVLGSAHQGCLPPFPADVFMIPQYGYLTLNNGSQAVGRSSFYCLEYFPSQMLRTGNNFTFSYTFEEVPFHSSYAHSQSLDRLMNPLIDQYLYYLNRTQNQSGSAQNKDLLFSRGSPAGMSVQPKNWLPGPCYRQQRVSKTKTDNNNSNFTWTGASKYNLNGRESIINPGTAMASHKDDEDKFFPMSGVMIFGKESAGASNTALDNVMITDEGEIKATNPVATERFGTVAVNFQSSSTDPATGDVHAMGALPGMVWQDRDVYLQGPIWAKIPHTDGHFHPSPLMGGFGLKNPPPQILIKNTPVPANPPAEFSATKFASFITQYSTGQVSVEIEWELQKENSKRWNPEVQYTSNYAKSANVDFTVDNNGLYTEPRPIGTRYLTRPL

SEQ ID NO: 780 - protein, 736 aa, synthetic construct
  REGION 1..736: note = Description of Artificial Sequence: Synthetic polypeptide
MAADGYLPDWLEDNLSEGIREWWDLKPGAPKPKANQQKQDDGRGLVLPGYKYLGPFNGLDKGEPVNAADAAALEHDKAYDQQLKAGDNPYLRYNHADAEFQERLQEDTSFGGNLGRAVFQAKKRVLEPFGLVEEGAKTAPGKKRPVEQSPQEPDSSSGIGKTGQQPAKKRLNFGQTGDSESVPDPQPLGEPPATPAAVGPTTMASGGGAPMADNNEGADGVGNASGNWHCDSTWLGDRVITTSTRTWALPTYNNHLYKQISSASTGASNDNHYFGYSTPWGYFDFNRFHCHFSPRDWQRLINNNWGFRPKRLNFKLFNIQVKEVTTNDGVTTIANNLTSTVQVFSDSEYQLPYVLGSAHQGCLPPFPADVFMIPQYGYLTLNNGSQAVGRSSFYCPEYFPSQMLRTGNNFTFSYTFEEVPFHSSYAHSQSLDRLMNPLIDQYLYYLNRTQNQSGSAQNKDLLFSRGSPAGMSVQPKNWLPGPCYRQQRVSKTKTDNNNSNFTWTGASKYNLNGRESIINPGTAMASHKDDKDKFFPMSGVMIFGKESAGASNTALDNVMITDEEEIKATNPVATERFGTVAVNFQSSNTDPATGDVHVMGALPGMVWQDRDVYLQGPIWAKIPHTDGHFHPSPLMGGFGLKHPPPQILIKNTPVPANPPAEFSATKFASFITQYSTGQVSVEIEWELQKENSKRWNPEVQYTSNYAKSANVDFTVDNNGLYTEPRPIGTRYLTRPL

SEQ ID NO: 781 - protein, 736 aa, synthetic construct
  REGION 1..736: note = Description of Artificial Sequence: Synthetic polypeptide
MAADGYLPDWLEDNLSEGIREWWDLKPGAPKPKANQQKQDDGRGLVLPGYKYLGPFNGLDKGEPVNAADAAALEHDKAYDQQLKAGDNPYLRYNHADAEFQERLQEDTSFGGNLGRAVFQAKKRVLEPFGLVEEGAKTAPGKKRPVEQSPQEPDSSSGIGKTGQQPAKKRLNFGQTGDSESVPDPQPLGEPPATPAAVGPTTMASGGGAPMADNNEGADGVGNASGNWHCDSTWLGDRVITTSTRTWALPTYNNHLYKQISSASTGASNDNHYFGYSTPWGYFDFNRFHCHFSPRDWQRLINNNWGFRPKRLNFKLFNIQVKEVTTNDGVTTIANNLTSTVQVFSDSEYQLPYVLGSAHQGCLPPFPADVFMIPQYGYLTLNNGSQAVGRSSFYCLEYFPSQMLRTGNNFTFSYTFEEVPFHSSYAHSQSLDRLMNPLIDQYLYYLNRTQNQSGSAQNKDLLFSRGSPAGMSVQPKNWLPGPCYRQQRVSKTKTDNNNSNFTWTGASKYNLNGRESIINPGTAMASHKDDKDKFFPMSGVMIFGKESAGASNTALDNVMITDEEEIKATNPVATERFGTVAVNFQSSDTDPATGDVHVMGALPGMVWQDRDVYLQGPIWAKIPHTDGHFHPSPLMGGFGLKHPPPQILIKNTPVPANPPAEFSATKFASFITQYSTGQVSVEIEWELQKENSKRWNPEVQYTSNYAKSANVDFTVDNNGLYTEPRPIGTRYLTRPL

SEQ ID NO: 782 - protein, 736 aa, synthetic construct
  REGION 1..736: note = Description of Artificial Sequence: Synthetic polypeptide
MAADGYLPDWLEDNLSEGIREWWDLKPGAPKPKANQQKQGDGRGLVLPGYKYLGPFNGLDKGEPVNAADAAALEHDKAYDQQLKAGDNPYLRYNHADAEFQERLQEDTSFGGNLGRAVFQAKKRVLEPFGLVEEGAKTAPGKKRPVEQSPQEPDSSSGIGKTGQQPAKKRLNFGQTGDSESVPDPQPLGEPPATPAAVGPTTMASGGGAPMADNNEGADGVGNASGNWHCDSTWLGDRVITTNTRTWALPTYNNHLYKQISSASTGASNDNHYFGYSTPWGYFDFNRFHCHFSPRDWQRLINNNWGFRPKRLNFKLFNIQVKEVTTNDGVTTIANNLTSTVQVFSDSEYQLPYVLGSAHQGCLPPFPADVFMIPQYGYLTLNNGSQAVGRSSFYCLEYFPSQMLRTGNNFTFSYTFEEVPFHSSYGHSQSLDRLMNLLIDQYLYYLNRTQNQSGSAQNKDLLFSRGSPAGMFVQPKNWLPGPCYRQQRVSKTKTDNNNSNFTWTGASKYNLNGRESIINPGTAMASHKDDEDKFFPMSGVMIFGKESAGASNTALDNVMITDEEEIKATNPVATERFGTVAVNFQSSSTDPATGDVHVMGALPGMVWQDRDVYLQGPIWAKIPHTDGHFHPSPLMGGFGLKHPPPQILIKNTPVPANPPAEFSATKFASFITQYSTGQVSVEIEWELQKENSKRWNPEVQYTSNYAKSANVDFTVDNNGLYTEPRPIGTRYLTRPL

SEQ ID NO: 783 - protein, 736 aa, synthetic construct
  REGION 1..736: note = Description of Artificial Sequence: Synthetic polypeptide
MAADGYLPDWLEDNLSEGIREWWDLKPGAPKPKANQQKQDDGRGLVLPGYKYLGPFNGLDKGEPVNAADAAALEHDKAYDQQLKAGDNPYLRYNHADAEFQERLQEDTSFGGNLGRAVFQAKKRVLEPFGLVEEGAKTAPGKKRPVEQSPQEPDSSSGIGKTGQQPAKKRLNFGQTGDSESVPDPQPLGEPPATPAAVGPTTMASGGGAPMADNNEGADGVGNASGNWHCDSTWLGDRVITTNTRTWALPTYNNHLYKQISSASTGASNDNHYFGYSTPWGYFDFNRFHCHFSPRDWQRLINNNWGFRPKRLNFKLFNIQVKEVTTNDGVTTIANNLTSTVQVFSDSEYQLPYVLGSAHQGCLPPFPADVFMIPQYGYLMLNNGSQAVGRSSFYCLEYFPSQMLRTGNNFTFSYTFEEVPFHSSYAHSQSLDRLMNPLIDQYLYYLNRTQNQSGSAQNKDLLFSRGSPAGMSVQPKNWLPGPCYRQQRVSKTKTDNNNSNFTWTGASKYNLNGRESIINPGTAMASHKDDEDKFFPMSGVMIFGKESAGASNTALDNVMITDEEEIKATNPAATERFGTVAVNFQSSSTDPATGDVHVMGALPGMVWQDRDVYLQGPIWAKIPHTDGHFHPSPLMGGFGLKHPPPQILIKNTPVPANPPAEFSATKFASFITQYSTGQVSVEIEWELQKENSKRWNPEVQYTSNYAKSANVDFTVDNNGLYTEPRPIGTRYLTRPL

SEQ ID NO: 784 - protein, 736 aa, synthetic construct
  REGION 1..736: note = Description of Artificial Sequence: Synthetic polypeptide
MAADGYLPDWLEDNLSEGIREWWDLKPGAPKPKANQQKQDDGRGLVLPGYKYLGPFNGLDKGEPVNAADAAALEHDKAYDQQLKAGDNPYLRYNHADAEFQERLQEDTSFGGNLGRAVFQAKKRVLEPFGLVEEGAKTAPGKKRPVEQSPQEPDSSSGIGKTGQQPAKKRLNFGQTGDSESVPDPQPLGEPPATPAAVGPTTMASGGGAPMADNNEGADGVGNASGNWHCDSTWLGDRVITTSTRTWALPTYNNHLYKQISSASTGASNDNHYFGYSTPWGYFDFNRFHCHFSPRDWQRLINNNWGFRPKRLNFKLFNIQVKEVTTNDGVTTIANNLTSTVQVFSDSEYQLPYVLGSAHQGCLPPFPADVFMIPQYGYLTLNNGSQAVGRSSFYCLEYFPSQMLRTGNNFTFSYTFEEVPFHSSYAHSQSLDRLMNPLIDQYLYYLNRTQNQSGSAQNKDLLFSRGSPAGMSVQPKNWLPGPCYRQQRVSKTKTDNNNSNFTWTGASKYNLNGRESIINPGTAMASHKDDEDKFFPMSGVMIFGKESAGASNTALDNVMITDEEEIKATNPVATERFGTVAVNFQSSSTDPATGDVHVMGALPGMVWQDRDVYLQGPIWAKIPHTDGHFHPSPLMGGFGLKHPPPQILIKNTPVPANPPAEFSATKFASFITQYSTGQVSVEIEWELQKENSKRWNPEVQYTSNYAKSANVDFTVDNNGLYTEPRPIGTRYLTRPL

SEQ ID NO: 785 - protein, 736 aa, synthetic construct
  REGION 1..736: note = Description of Artificial Sequence: Synthetic polypeptide
  VARIANT 102: note = MOD_RES - Any amino acid
MAADGYLPDWLEDNLSEGIREWWDLKPGAPKPKANQQKQDDGRGLVLPGYKYLGPFNGLDKGEPVNAADAAALEHDKAYDQQLKAGDNPYLRYNHADAEFQXRLQEDTSFGGNLGRAVFQAKKRVLEPFGLVEEGAKTAPGKKRPVEQSPQEPDSSSGIGKTGQQPAKKRLNFGQTGDSESVPDPQPLGEPPATPAAVGPTTMASGGGAPMADNNEGADGVGNASGNWHCDSTWLGGRVITTSTRTWALPTYNNHLYKQISSASTGASNDNHYFGHSTPWGYFDFNRFHCHFSPRDWQRLINNNWGFRPKRLNFKLFNIQVKEVTTNDGVTTIANNLTSTVQVFSDSEYQLPYVLGSAHQGCLPPSPADVFMIPQYGYLTLNNGSQAVGRSSFYCLEYFPSQMLRTGNNFTFSYTFEEVPFHSSYAHSQSLDRLMNPLIDQYLYYLNRTQNQSGSAQNKDLLFSRGSPAGMSVQPKNWLPGPCYRQQRVSKTKTDNNNSNFTWTGASKYNLNGRESIINPGTAMASHKDDKDKFFPMSGVMIFGKESAGASNTALDNVMITDEEEIKATNPVATERFGTVAVNFQSSNTDPATGDVHVMGALPGMVWQDRDVYLQGPIWAKIPHTDGHFHPSPLMGGFGLKHPPPQILIKNTPVPANPPAEFSATKFASFITQYSTGQVSVEIEWELQKENSKRWNPEVQYTSNYAKSANVDFTVDNNGLYTEPRPIGTRYLTRPL

SEQ ID NO: 786 - protein, 736 aa, synthetic construct
  REGION 1..736: note = Description of Artificial Sequence: Synthetic polypeptide
MAADGYFPDWLEDNLSEGIREWWDLKPGAPKPKANQQKQDDGRGLVLPGYKYLGPFNGLDKGEPVNAADAAALEHDKAYDQQLKAGDNPYLRYNHADAEFQERLQEDTSFGGNLGRAVFQAKKRVLEPFGLVEEGAKTAPGKKRPVEQSPQEPDSSSGIGRTGQQPAKKRLNFGQTGDSESVPDPQPLGEPPATPAAVGPTTMASGGGAPMADNNEGADGVGNASGNWHCDSTWLGDRVITTSTRTWALPTYNNHLYKQISSASTGASNDNHYFGYSTPWGYFDFNRFHCHFSPRDWQRLINNNWGFRPKRLNFKLFNIQVKEVTTNDGVTTIANNLTSTVQVFSDSEYQLPYVLGSAHQGCLPPFPADVFMIPQYGYLTLNNGSQAVGRSSFYCLEYFPSQMLRTGNNFTFSYTFEEVPFHSSYAHSQSLDRLMNPLIDQYLYYLNRTQNQSGSAQNKDLLFSRGSPAGMSVQPKNWLPGPCYRQQRVSKTKTDNNNSNFTWTGASKYNLNGRESIINPGTAMASHKDDEDKFFPMSGVMIFGKESAGASNTALDNVMITDEEEIKATNPVATERFGTVAVNFQSSSPDPATGDVHVMGALPGMVWQDRDVYLQGPIWAKIPHTDGHFHPSPLMGGFGLKHPPPQILIKNTPVPANPPAEFSATKFASFITQYSTGQVSVEIEWELQKENSKRWNPEVQYTSNYAKSANVDFTVDNNGLYSEPRPIGTRYLTRPL

SEQ ID NO: 787 - protein, 736 aa, synthetic construct
  REGION 1..736: note = Description of Artificial Sequence: Synthetic polypeptide
MAADGYLPDWLEDNLSEGIREWWDLKPGAPKPKANQQKQDDGRGLVLPGYKYLGPFNGLDKGEPVNAADAAALEHDKAYDQQLKAGDNPYLRYNHADAEFQERLQEDTSFGGNLGRAVFQAKKRVLEPFGLVEEGAKTAPGKKRPVEQSPQEPDSSSGIGKTGQQPAKKRLNFGQTGDSESVPDPQPLGEPPATPAAVGPTTMASGGGAPMADNNEGADGVGNASGNWHCDSTWLGDRVITTSTRTWALPTYNNHLYKQTSSASTGASNDNHYFGYSTPWGYFDFNRFHCHFSPRDWQRLINNNWGFRPKRLNFKLFNIQVKEVTTNDGVTTIANNLTSTVQVFSDSEYQLPYVLGSAHQGCLPPFPADVFMIPQYGYLTLNNGSQAVGRSSFYCLEYFPSQMLRTGNNFTFSYTFEEVPFHSSYAHSQSLDRLMNPLIDQYLYYLNRTQNQSGSAQNKDLLFSRGSPAGMSVQPKNWLPGPCYRQQRVSKTKTDYNNSNFTWTGASKYNLNGRESIINPGTAMASHKDDEDKFFPMSGVMIFGKESAGASNTALDNVMITDEEEIKATNPVATERFGTVAVNFQSSSTDPATGDVHVMGALPGMVWQDRDVYLQGPIWAKIPHTDGHFHPSPLMGGFGLKHPPPQILIKNTPVPANPPAEFSATKFASFITQYSTGQVSVEIEWELQKENSKRWNPEVQYTSNYAKSANVDFTVDNNGLYTEPRPIGTRYLTRPL

SEQ ID NO: 788 - protein, 736 aa, synthetic construct
  REGION 1..736: note = Description of Artificial Sequence: Synthetic polypeptide
MAADGYPPDWLEDNLSEGIREWWDLKPGVPKPKANQQKQDDGRGLVLPGYKYLGPFNGLDKGEPVNAADAAALEHDKAYDQQLKAGDNPYLRYNHADAEFQERLQEDTSFGGNLGRAVFQAKKRVLEPFGLVEEGAKTAPGKKRPVEQSPQEPDSSSGIGKTGQQPAKKRLNFGQTGDSESVPDPQPLGEPPATPAAVGPTTMASGGGAPMADNNEGADGVGNASGNWHCDSTWLGDRVITTSTRTWALPTYNNHLYKQISSASTGASNDNHYFGYSTPWGYFDFNRFHCHFSPRDWQRLINNNWGFRPKRLNFKLFNIQVKEVTTNDGVTTIANNLTSTVQVFSDSEYQLPYVLGSAHQGCLPPFPADVFMIPQYGYLTLNNGSQAVGRSSFYCLEYFPSQMLRTGNNFTFSYTFEEVPFHSSYAHSQSLDRLMNPLIDQYLYYLNRTQNQSGSAQNKDLLFSRGSPAGMSVQPKNWLPGPCYRQQRVSKTKTDNNNSNFTWTGASKYNLNGRESIINPGTAMASHKDDEDKFFPMSGVMIFGKESAGASNTALDNVMITDEEEIKATNPVATERFGTVAVNFQSSSTDPATGDVHVMGALPGMVWQDRDVYLQGPIWAKIPHTDGHFHPSPLMGGFGLKHPPPQILIKNTPVPANPPAEFSATKFASFITQYSTGQVSVEIEWELQKENSKRWNPEVQYTSNYAKSANVDFTVDNNGLYTEPRPIGTRYLTRPL

SEQ ID NO: 789 - protein, 732 aa, synthetic construct
  REGION 1..732: note = Description of Artificial Sequence: Synthetic polypeptide
MAADGYLPDWLEDNLSEGIREWWDLKPGAPKPKANQQKQDDGRGLVLPGYKYLGPFNGLDKGEPVNAADAAALEHDKAYDQQLKAGDNPYLRYNHADAEFQERLQEDTSFGGNLGRAVFQAKKRVLEPFGLVEEGAKTAPGKKRPVEQSPQEPDSSSGIGKTGQQPAKKRLNFGQTGDSESVPDPQPLGEPPATPAAVGPTTMASGGGAPMADNNEGADGVGNASGNWHCDSTWLGDRVITTSTRTWALPTYNNHLYKQISSASTGASNDNHYFGYSTPWGYFDFNRFHCHFSPRDWQRLINNNWGFRPKRLNFKLFNIQVKEVTTNDGVTTIANNLTSTVQAFSDSEYQLPYVLGSAHQGCLPPFPADVFMIPQYGYLTLNNGSQAVGRSSFYCLEYFPSQMLRTGNNFTFSYTFEEVPFHSSYAHSQSLDRLMNPLIDPYLYYLNRTQNQSGSAQNKDLLFSRGSPAGMSVQPKNWLPGPCYRQQRVSKTKTDNNNSNFTWTGASKYNLNGRESIINPGTAMASHKDDEDKFFPMSGVMIFGKESAGASNTALDNVMITDEEEIKATNPVATERFGTVAVNFQSSSTDPATGDVHVMGALPGMVWQDRDVYLQGPIWAKIPHTDGHFHPSPLMGGFGLKHPPPQILIKNTPVPANPPAEFSATKFASFITQYSTGQVSVEIEWELQKENSKRWNPEVQYTSNYAKSANVDFTVDNNGLYTEPRPIGTRYL

SEQ ID NO: 790 - protein, 736 aa, synthetic construct
  REGION 1..736: note = Description of Artificial Sequence: Synthetic polypeptide
MAADGYLPDWLEDNLSEGIREWWDLKPGAPKPKANQQKQDDGRGLVLPGYKYLGPFNGLDKGEPVNAADAAALEHDKAYDQQLKAGDNPYLRYNHADAEFQERLQEDTSFGGNLGRAVFQAKKRVLEPFGLVEEGAKTAPGKKRPVEQSPQEPDSSSGIGKTGQQPAKKRLNFGQTGDSESVPDPQPLGEPPATPAAVGPTTMASGGGAPMADNNEGADGVGNASGNWHCDSTWLGDRVITTSTRTWALPTYNNHLYKQISSASTGASNDNHYFGYSTPWGYFDFNRFHCHFSPRDWQRLINNNWGFRPKRLNFKLFNIQVKEVTTNDGVTTIANNLTSTVQVFSDSEYQLPYVLGSAHQGCLPPFPADVFMIPQYGYLTLNNGSQAVGRSSFYCLEYFPSQMLRTGNNFTFSYTFEEVPFHSSYAHSQSLDRLMNPLIDQYLYYLNRTQNQSGSAQNKDLLFSRGSPAGMSVQPKNWLPGPCYRQQRVSKTKTDNNNSNFTWTGASKYNLNGRESIINPGTAMASHKDDEDKFFPMSGVMIFGKESAGASNTALDNVMITDEEEIKATNPVATERFGTVAVNFQSSSTDPATGDVHVMGALPGMVWQDRDVYLQGPIWAKIPHTDGHSHPSPLMGGFGLKHPPPQILIKNTPVPANPPAEFSATKFASFITQYSTGQVSVEIEWELQKENSKRWNPEVQYTSNYAKSANVDFTVDNNGLYTEPRPIGTRYLTRPL

SEQ ID NO: 791 - protein, 736 aa, synthetic construct
  REGION 1..736: note = Description of Artificial Sequence: Synthetic polypeptide
MAADGYLPDWLEDNLSEGIREWWDLKPGAPKPKANQQKQDDGRGLVLPGYKYLGPFNGLDKGEPVNAADAAALEHDKAYDQQLKAGDNPYLRYNHADAEFQERLQEDTSFGGNLGRAVFQAKKRVLEPFGLVEEGAKTAPGKKRPVEQSPQEPDSSSGIGKTGQQPAKKRLNFGQTGDSESVPDPQPLGEPPATPAAVGPTTMASGGGAPMADNNEGADGVGNASGNWHCDSTWLGDRVITTSTRTWALPTYNNHLYKQISSASTGASNDNHYFGYSTPWGYFDFNRFHCHFSPRDWQRLINNNWGFRPKRLNFKLFNIQVKEVTTNDGVTTIANNLTSTVQVFSDSEYQLPYVLGSAHQGCLPPFPADVFMIPQYGYLTLNNGSQAVGRSSFYCLEYFPSQMLRTGNNFTFSYTFEEVPFHSSYAHSQSLDRLMNPLIDLYLYYLNRTQNQSGSAQNKDLLFSRGSPAGMSVQPKNWLPGPCYRQQRVSKTKTDNNNSNFTWTGASKYNLNGRESIINPGTAMASHKDDEDKFFPMSGVMIFGKESAGTSNTALDNVMITDEEEIKATNPVATERFGTVAVNFQSSSTDPATGDVHVMGALPGMVWQDRDVYLQGPIWAKIPHTDGHFHPSPLMGGFGLKHPPPQILIKNTPVPANPPAEFSATKFASFITQYSTGQVSVEIEWELQKENSKRWNPEVQYTSNYAKSANVDFTVDNNGLYTEPRPIGTRYLTRPL

SEQ ID NO: 792 - protein, 736 aa, synthetic construct
  REGION 1..736: note = Description of Artificial Sequence: Synthetic polypeptide
MAADGYLPDWLEDSLSEGIREWWDLKPGAPKPKANQQKQDDGRGLVLPGYKYLGPFNGLDKGEPVNAADAAALEHDKAYDQQLKAGDNPYLRYNHADAEFQERLQEDTSFGGNLGRAVFQAKKRVLEPFGLVEEGAKTAPGKKRPVEQSPQEPDSSSGIGKTGQQPAKKRLNFGQTGDSESVPDPQPLGEPPATPAAVGPTTMASGGGAPMADNNEGADGVGNASGNWHCDSTWLGDRVITTSTRTWALPTYNNHLYKQISSASTGASNDNHYFGYSTPWGYFDFNRFHCHFSPRDWQRLINNNWGFRPKRLNFKLFNIQVKEVTTNDGVTTIANNLTSTVQVFSDSEYQLPYVLGSAHQGCLPPFPADVFMIPQYGYLTPNNGSQAVGRSSFYCLEYFPSQMLRTGNNFTFSYTFEEVPFHSSYAHSQSLDRLMNPLIDQYQYYLNRTQNQSGSAQNKDLLFSRGSPAGMSVQPKNWLPGPCYRQQRVSKTKTDNNNSNFTWTGASKYNLNGRESIINPGTAMASHKDDEDKFFPMSGVMIFGKESAGASNTALDNVMITDEEEIKATNPVATERFGTVAVNFQSSSTDPATGDVHVMGALPGMVWQDRDVYLQGPIWAKIPHTDGHFHPSPLMGGFGLKHPPPQILIKNTPVPANPPAEFSATKFASFITQYSTGQVSVEIEWELQKENSKRWNPEVQYTSNYAKSANVDFTVDNNGLYTEPRPIGTRYLTRPL

SEQ ID NO: 793 - protein, 736 aa, synthetic construct; identical to SEQ ID NO: 784
  REGION 1..736: note = Description of Artificial Sequence: Synthetic polypeptide

SEQ ID NO: 794 - protein, 735 aa, synthetic construct
  REGION 1..735: note = Description of Artificial Sequence: Synthetic polypeptide
MAADGYLPDWLEDTLSEGIRQWWKLKPGPPPPKPAERHKDDSRGLVLPGYKYLGPFNGLDKGEPVNEADAAALEHDKAYDRQLDSGDNPYLKYNHADAEFQERLKEDTSFGGNLGRAVFQAKKRVLEPLGLVEEPVKTAPGKKRPVEHSPVEPDSSSGTGKAGQQPARKRLNFGQTGDADSVPDPQPLGQPPAAPSGLGTNTMATGSGAPMADNNEGADGVGNSSGNWHCDSTWMGDRVITTSTRTWALPTYNNHLYKQISSQSGASNDNHYFGYSTPWGYFDFNRFHCHFSPRDWQRLINNNWGFRPKRLNFKLFNIQVKEVTQNDGTTTIANNLTSTVQVFTDSEYQLPYVLGSAHQGCLPPFPADVFMVPQYGYLTLNNGSQAVGRSSFYCLEYFPSQMLRTGNNFTFSYTFEDVPFHSSYAHSQSLDRLMNPLIDQYLYYLSRTNTPSGTTTQSRLQFSRAGASDIRDQSRNWLPGPCYRQQRVSKTSADNNNSEYSWTGATKYHLNGRDSLVNPGPAMASHKDDEEKFFPQSGVLIFGKQGSEKTNVDIEKVMITDEEEIRTTNPVATEQYGSVSTNLQRGNRQAATADVNTQGVLPGMVWQDRDVYLQGPIWAKIPHTDGHFHPSPLMGGFGLKHPPPQILIKNTPVPANPSTTFSAAKFASFITQYSTGQVSVEIEWELQKENSKRWNPEIQYTSNYNKSVNVDFTVDTNGVYSEPRPIGTRYLTRNL

SEQ ID NO: 795 - DNA, 2211 bp, synthetic construct
  misc_feature 1..2211: note = Description of Artificial Sequence: Synthetic polynucleotide
  source 1..2211: mol_type = other DNA
atggctgctgacggttatcttccagattggctcgaggacaacctttctgaaggcattcgtgagtggtgggctctgaaacctggagtccctcaacccaaagcgaaccaacaacaccaggacaaccgtcggggtcttgtgcttccgggttacaaatacctcggacccggtaacggactcgacaaaggagagccggtcaacgaggcggacgcggcagccctcgaacacgacaaagcttacgaccagcagctcaaggccggtgacaacccgtacctcaagtacaaccacgccgacgccgagtttcaggagcgtcttcaagaagatacgtcttttgggggcaaccttggcagagcagtcttccaggccaaaaagaggatccttgagcctcttggtctggttgaggaagcagctaaaacggctcctggaaagaagaggcctgtagatcagtctcctcaggaaccggactcatcatctggtgttggcaaatcgggcaaacagcctgccagaaaaagactaaatttcggtcagactggcgactcagagtcagtcccagaccctcaacctctcggagaaccaccagcagcccccacaagtttgggatctaatacaatggcttcaggcggtggcgcaccaatggcagacaataacgagggtgccgatggagtgggtaattcctcaggaaattggcattgcgattcccaatggctgggcgacagagtcatcaccaccagcaccagaacctgggccctgcccacttacaacaaccatctctacaagcaaatctccagccaatcaggagcttcaaacgacaaccactactttggctacagcaccccttgggggtattttgactttaacagattccactgccacttctcaccacgtgactggcagcgactcattaacaacaactggggattccggcccaagaaactcagcttcaagctcttcaacatccaagttaaagaggtcacgcagaacgatggcacgacgactattgccaataaccttaccagcacggttcaagtgtttacggactcggagtatcagctcccgtacgtgctcgggtcggcgcaccaaggctgcctcccgccgtttccagcggacgtcttcatggtccctcagtatggatacctcaccctgaacaacggaagtcaagcggtgggacgctcatccttttactgcccggagtacttcccttcgcagatgctaaggactggaaataacttccaattcagctataccttcgaggatgtaccttttcacagcagctacgctcacagccagagtttggatcgcttgatgaatcctcttattgatcagtatctgtactacctgaacagaacgcaaggaacaacctctggaacaaccaaccaatcacggctgctttttagccaggctgggcctcagtctatgtctttgcaggccagaaattggctacctgggccctgctaccggcaacagagactttcaaagactgctaacgacaacaacaacagtaactttccttggacagcggccagcaaatatcatctcaatggccgcgactcgctggtgaatccaggaccagctatggccagtcacaaggacgatgaagaaaaatttttccctatgcacggcaatctaatatttggcaaagaagggacaacggcaagtaacgcagaattagataatgtaatgattacggatgaagaagagattcgtaccaccaatcctgtggcaacagagcagtatggaactgtggcaaataacttgcagagctcaaatacagctcccacgactagaactgtcaatgatcagggggccttacctggcatggtgtggcaagatcgtgacgtgtaccttcaaggacctatctgggcaaagattcctcacacggatggacactttcatccttctcctctgatgggaggctttggactgaaacatccgcctcctcaaatcatgatcaaaaatactccggtaccggcaaatcctccgacgactttcagcccggccaagtttgcttcatttatcactcagtactccactggacaggtcagcgtggaaattgagtgggagctacagaaagaaaacagcaaacgttggaatccagagattcagtacacttccaactacaacaagtctgttaatgtggactttactgtagacactaatggtgtttatagtgaacctcaccctattggaacccggtatctcacacgaaacttgtaa

SEQ ID NO: 796 - DNA, 2211 bp, synthetic construct
  misc_feature 1..2211: note = Description of Artificial Sequence: Synthetic polynucleotide
  source 1..2211: mol_type = other DNA
atggctgctgatggttatcttccagattggctcgaggacaacctttctgaaggcattcgtgagtggtgggctctgaaacctggagtccctcaacccaaagcgaaccaacaacaccaggacaaccgtcggggtcttgtgcttccgggttacaaatacctcggacccggtaacggactcgacaaaggagagccggtcaacgaggcggacgcggcagccctcgaacacgacaaagcttacgaccagcagctcaaggccggtgacaacccgtacctcaagtacaaccacgccgacgccgagtttcaggagcgtcttcaagaagatacgtcttttgggggcaaccttggcagagcagtcttccaggccaaaaagaggatccttgagcctcttggtctggttgaggaagcagctaaaacggctcctggaaagaagaggcctgtagatcagtctcctcaggaaccggactcatcatctggtgttggcaaatcgggcaaacagcctgccagaaaaagactaaatttcggtcagactggcgactcagagtcagtcccagaccctcaacctctcggagaaccaccagcagcccccacaagtttgggatctaatacaatggcttcaggcggtggcgcaccaatggcagacaataacgagggtgccgatggagtgggtaattcctcaggaaattggcattgcgattcccaatggctgggcgacagagtcatcaccaccagcaccagaacctgggccctgcccacttacaacaaccatctctacaagcaaatctccagccaatcaggagcttcaaacgacaaccactactttggctacagcaccccttgggggtattttgactttaacagattccactgccacttctcaccacgtgactggcagcgactcattaacaacaactggggattccggcccaagaaactcagcttcaagctcttcaacatccaagttaaagaggtcacgcagaacgatggcacgacgactgttgccaataaccttaccagcacggttcaagtgtttacggactcggagtatcaactcccgtacgtgctcgggtcggcgcaccaaggctgtctcccgccgtttccagcggacgtcttcatggtccctcagtatggatacctcaccctgaacaacggaagtcaagcggtgggacgctcatccttttactgcctggagtacttcccttcgcagatgctaaggactggaaataacttccaattcagctataccttcgaggatgtaccttttcacagcagctacgctcacagccagagtttggatcgcttgatgaatcctcttattgatcagtatctgtactacctgaacagaacgcaaggaacaacctctggaacaaccaaccaatcacggctgctttttagccaggctgggcctcagtctatgtctttgcaggccagaaattggctacctgggccctgctaccggcaacagagactttcaaagactgctaacgacaacaacaacagtaactttccttggacagcggccagcaaatatcatctcaatggccgcgactcgctggtgaatccaggaccagctatggccagtcacaaggacgatgaagaaaaatttttccctatgcacggcaatctaatatttggcaaagaagggacaacggcaagtaacgcagaattagataatgtaatgattacggatgaagaagagattcgtaccaccaatcctgtggcaacagagcagtatggaactgtggcaaataacttgcagagctcaaatacagctcccacgactagaactgtcaatgatcagggggccttacctggcatggtgtggcaagatcgtgacgtgtaccttcaaggacctatctgggcaaagattcctcacacggatggacactttcatccttctcctctgatgggaggctttggactgaaacatccgcctcctcaaatcatgatcaaaaatactccggtaccggcaaatcctccgacgactttcagcccggccaagtttgcttcatttatcactcagtactccactggacaggtcagcgtggaaattgagtgggagctacagaaagaaaacagcaaacgttggaatccagagattcagtacacttccaactacaacaagtctgttaatgtggactttactgtagacactaatggtgtttatagtgaacctcgccctattggaacccggtatctcacacgaaacttgtaa

SEQ ID NO: 797 - DNA, 2211 bp, synthetic construct
  misc_feature 1..2211: note = Description of Artificial Sequence: Synthetic polynucleotide
  source 1..2211: mol_type = other DNA
atggctgctgacggttatcttccagattggctcgaggacaacctttctgaaggcattcgtgagtggtgggctctgaaacctggagtccctcaacccaaagcgaaccaacaacaccaggacaaccgtcggggtcttgtgcttccgggttacaaatacctcggacccggtaacggactcgacaaaggagagccggtcaacgaggcggacgcggcagccctcgaacacgacaaagcttacgaccagcagctcaaggccggtgacaacccgtacctcaagtacaaccacgccgacgccgagtttcaggagcgtcttcaagaagatacgtcttttgggggcaaccttggcagagcagtcttccaggccaaaaagaggatccttgagcctcttggtctggttgaggaagcagctaaaacggctcctggaaagaagaggcctgtagatcagtctcctcaggaaccggactcatcatctggtgttggcaaatcgggcaaacagcctgccagaaaaagactaaatttcggtcagactggcgactcagagtcagtcccagaccctcaacctctcggagaaccaccagcagcccccacaagtttgggatctaatacaatggcttcaggcggtggcgcaccaatggcagacaataacgagggtgccgatggagtgggtaattcctcaggaaattggcattgcgattcccaatggctgggcgacagagtcatcaccaccagcaccagaacctgggccctgcccacttacaacaaccatctctacaagcaaatctccggccaatcaggagcttcaaacgacaaccactactttggctacagcaccccttgggggtattttgactttaacagattccactgccacttctcaccacgtgactggcagcgactcattaacaacaactggggattccggcccaagaaactcagcttcaagctcttcaacatccaagttaaagaggtcacgcagaacgatggcacgacgactattgccaataaccttaccagcacggttcaagtgtttacggactcggagtatcagctcccgtacgtgctcgggtcggcgcaccaaggctgtctcccgccgtttccagcggacgtcttcatggtccctcagtatggatacctcaccctgaacaacggaagtcaagcggtgggacgctcatccttttactgcctggagtacttcccttcgcagatgctaaggactggaaataacttccaattcagctataccttcgaggatgtaccttttcacagcagctacgctcacagccagagtttggatcgcttgatgaatcctcttattgatcagtatctgtactacctgaacagaacgcaaggaacaacctctggaacaaccaaccaatcacggctgctttttagccaggctgggcctcagtctatgtctttgcaggccagaaattggctacctgggccctgctaccggcaacagagactttcaaagactgctaacggcaacaacaacagtaactttccttggacagcggccagcaaatatcatctcaatggccgcgactcgctggtgaatccaggaccagctatggccagtcacaaggacgatgaagaaaaatttttccctatgcacggcaatctaatatttggcaaagaagggacaacggcaagtaacgcagaattagataatgtaatgattacggatgaagaagagattcgtaccaccaatcctgtggcaacagagcagtgtggaactgtggcaaataacttgcagagctcaaatacagctcccacgactagaactgtcaatgatcagggggccttacctggcatggtgtggcaagatcgtgacgtgtaccttcaaggacctatctgggcaaagattcctcacacggatggacactttcatccttctcctctgatgggaggctttggactgaaacatccgcctcctcaaatcatgatcaaaaatactccggtaccggcaaatcctccgacgactttcagcccggccaagtttgcttcatttatcactcagtactccactggacaggtcagcgtggaaattgagtgggagctacagaaagaaaacagcaaacgttggaatccagagattcagtacacttccaactacaacaagtctgttaatgtggactttactgtagacactaatggtgtttatagtgaacctcgccctattggaacccggtatctcacacgaaacttgtaa

SEQ ID NO: 798 - DNA, 2212 bp, synthetic construct
  misc_feature 1..2212: note = Description of Artificial Sequence: Synthetic polynucleotide
  misc_difference 1283: note = modified_base - a, c, t, g, unknown or other
  source 1..2212: mol_type = other DNA
atggctgctgacggttatcttccagattggctcgaggacaacctttctgaaggcattcgtgagtggtgggctctgaaacctggagtccctcaacccaaagcgaaccaacaacaccaggacaaccgtcggggtcttgtgcttccgggttacaaatacctcggaccgggtaacggactcgacaaaggagagccggtcaacgaggcggacgcggcagccctcgaacacgacaaagcttacgaccagcagctcaaggccggtgacaacccgtacctcaagtacaaccacgccgacgccgagtttcaggagcgtcttcaagaagatacgtcttttgggggcaaccttggcagagcagtcttccaggccaaaaagaggatccttgagcctcttggtctggttgagggagcagctaaaacggctcctggaaagaagaggcctgtagatcagtctcctcaggaaccggactcatcatctggtgttggcaaatcgggcaaacagcctgccagaaaaagactaaatttcggtcagactggcgactcagagtcagtcccagaccctcaacctctcggagaaccaccagcagcccccacaagtttgggatctaatacaatggcttcaggcggtggcgcaccaatggcagacaataacgagggtgccgatggagtgggtaattcctcaggaaattggcattgcgattcccaatggctgggcgacagagtcatcaccaccagcaccagaacctgggccctgcccacttacaacagccatctctacaagcaaatctccagccaatcaggagcttcaaacgacaaccactactttggctacagcaccccttgggggtattttgactttaacagattccactgccacttctcaccacgtgactggcagcgactcattaacaacaactggggattccggcccaagaaactcagcttcaagctcttcaacatccaagttaaagaggtcacgcagaacgatggcacgacgactattgccaataaccttaccagcacggtccaagtgtttacggactcggagtatcagctcccgtacgtgctcgggtcggcgcaccaaggctgtctcccgccgtttccagcggacgccttcatggtccctcagtatggatacctcaccctgaacaacggaagtcaagcggtgggacgctcatccttttactgcctggagtacttcccttcgcagatgctaaggactggaaataacttccaattcagctataccttcgaggatgtaccttttcacggcagctacgctcacagccngagtttggatcgcttgatgaatcctcttattgatcagtatctgtactacctgaacagaacgcaaggaacaacctctggaacaaccaaccaatcacggctgctttttagccaggctgggcctcagtctatgtctttgcaggccagaaattggctacctgggccctgctaccggcaacagagacttttcaaagactgctaacgacaacaacaacagtaactttccttggacagcggccagcaaatatcatctcaatggccgcgactcgctggtgaatccaggaccagctatggccagtcacaaggacgatgaagaaaaatttttccctatgcacggcaatctaatatttggcaaagaagggacaacggcaagtaacgcagaattagataatgtaatgattacggatgaagaagagattcgtaccaccaatcctgtggcaacagagcagtatggaactgtggcaaataacttgcagagctcaaatacagctcccacgactagaactgtcaatgatcagggggccttacctggcatggtgtggcaagatcgtgacgtgtaccttcaaggacctatctgggcaaagattcctcacacggatggacactttcatccttctcctctgatgggaggctttggactgaaacatccgcctcctcaaatcatgatcaaaaatactccggtaccggcaaatcctccgacgactttcagcccggccaagtttgcttcatttatcactcagtactccactggacaggtcagcgtggaaattgagtgggagctacagaaagaaaacagcaaacgttggaatccagagattcagtacacttccaactacaacaagtctgttaatgtggactttactgtagacactaatggtgtttatagtgaacctcgccctattggaacccggtatctcacacgaaactcgtaa

SEQ ID NO: 799 - DNA, 2212 bp, synthetic construct
  misc_feature 1..2212: note = Description of Artificial Sequence: Synthetic polynucleotide
  source 1..2212: mol_type = other DNA
atggctgctgacggttatcttccagattggctcgaggacaacctttctgaaggcattcgtgagtggtgggctctgaaacctggagtccctcaacccaaagcgaaccaacaacaccaggacaaccgtcggggtcttgtgcttccgggttacaaatacctcggacccggtaacggactcgacaaaggagagccggtcaacgaggcggacgcggcagccctcgaacacgacaaagcttacgaccagcagctcaaggccggtgacaacccgtacctcaagtacaaccacgccgacgccgagtttcaggagcgtcttcaagaagatacgtcttttgggggcaaccttggcagagcagtcttccaggccaaaaagaggatccttgagcctcttggtctggttgagggagcagctaaaacggctcctggaaagaagaggcctgtagatcagtctcctcaggaaccggactcatcatctggtgttggcaaatcgggcaaacagcttgccagaaaaagactaaatttcggtcagactggcgactcagagtcagtcccagaccctcaacctctcggagaaccaccagcagcccccacaagtttgggatctaatacaatggcttcaggcggtggcgcaccaatggcagacaataacgagggtgccgatggagtgggtaattcctcaggaaattggcattgcgattcccaatggctgggcgacagagtcatcaccaccagcaccagaacctgggccctgcccacttacaacagccatctctacaagcaaatctccggccaatcaggagcttcaaacgacaaccactactttggctacagcaccccctgggggtattttgactttaacagattccactgccacttctcaccacgtgactggcagcgactcattaacaacaactggggattccggcccaagaaactcagcttcaagctcttcaacatccaagttaaagaggtcacgcagaacgatggcacgacgactattgccaataaccttaccagcacggttcaagtgtttacggactcggagtatcagctcccgtacgtgctcgggtcggcgcaccaaggctgtctcccgccgtttccagcggacgtcttcatggtccctcagtatggatacctcaccctgaacaacggaagtcaagcggtgggacgctcatccttttactgcctggagtacttcccttcgcagatgctaaggactggaaataacttccaattcagctataccttcgaggatgtaccttttcacagcagctacgctcacagccagagtttggatcgcttgatgaatcctcttattgatcagtatctgtactacctgaacagaacgcaaggaacaacctctggaacaaccaaccaatcacggctgctttttagccaggctgggcctcagtctatgtctttgcaggccagaaattggctacctgggccctgctaccggcaacagagactttcaaagactgctaacgacaacaacaacagtaactttccttggacagcggccagcaaatatcatctcaatggccgcgactcgctggtgaatcccaggaccagctatggccagtcacaaggacgatgaagaaaaatttttccctatgcacggcaatctaatatttggcaaagaagggacaacggcaagtaacgcagaattagataatgtaatgattacggatgaagaagagattcgtaccaccaatcctgtggcaacagagcagtatggaactgtggcaaataacttgcagagctcaaatacagctcccacgactagaactgtcaatgatcagggggccttacctggcatggtgtggcaagatcgtgacgtgtaccttcaaggacctatctgggcaaagattcctcacacggatggacactttcatccttctcctctgatgggaggctttggactgaaacatccgcctcctcaaatcatgatcaaaaatactccggtaccggcaaatcctccgacgactttcagcccggccaagtttgcttcatttatcactcagtactccactggacaggtcagcgtggaaattgagtgggagctacagaaagaaaacagcaaacgttggaatccagagattcagtacacttccaactacaacaagtctgttaatgtggactttactgtagacactaatggtgtttatagtgaacctcgccctattggaacccggtatctcacacgaaacttgtaa

SEQ ID NO: 800 - DNA, 2212 bp, synthetic construct
  misc_feature 1..2212: note = Description of Artificial Sequence: Synthetic polynucleotide
  source 1..2212: mol_type = other DNA
atggctgctgacggttatcttccagattggctcgaggacaacctttctgaaggcattcgtgagtggtgggctctgaaacctggagtccctcaacccaaagcgaaccaacaacaccaggacgaccgtcggggtcttgtgcttccgggttacaaatacctcggacccggtaacggactcgacaaaggagagccggtcaacgaggcggacgcggcagccctcgaacacgacaaagcttacgaccagcagctcaaggccggtgacaacccgtgcctcaagtacaaccacgccgacgccgagtttcaggagcgtcttcaagaagatacgtcttttgggggcaaccttggcagagcagtcttccaggccaaaaagaggatccttgagcctcttggtctggttgaggaagcagctaaaacggctcctggaaagaagaggcctgtagatcagtctcctcaggaaccggactcatcatctggtgttggcaaatcgggcaaacagcctgccagaaaaagactaaatttcggtcagactggcgactcagagtcagtcccagaccctcaacctctcggagaaccaccagcagcccccacaagtttgggatctaatacaatggcttcaggcggtagcgcaccaatggcagacaataacgagggtgccgatggagtgggtaattcctcaggaaattggcattgcgattcccaatggctgggcgacagagtcatcaccaccagcaccagaacctgggccctgcccacttacaacaaccatctctacaagcaaatctccagccaatcaggagcttcaaacgacaaccactactttggctacagcaccccttgggggtattttgactttaacagattccactgccacttctcaccacgtgactggcagcgactcattaacaacaactggggattccggcccaagaaactcagcttcaagctcttcaacatccaagttaaagaggtcacgcagaacgatggcacgacgactattgccaataaccttaccagcacggttcaagtgtttacggactcggagtatcagctcccgtacgtgctcgggtcggcgcaccaaggctgtctcccgccgtttccagcggacgtcttcatggtccctcagtatggatacctcaccctgaacaacggaagtcaagcggtgggacgctcatccttttactgcctggagtacttcccttcgcagatgctaaggactggaaataacttccaattcagctataccttcgaggatgtaccttttcacagcagctacgctcacagccagagtttggatcgcttgatggatcctcttattgatcagtatctgtactacctgaacagaacgcaaggaacaacctctggaacaaccaaccaatcacggctgctttttagccaggctgggcctcagtctatgtctttgcaggccagaaattggctacctgggccctgctaccggcaacagagactttcaaagactgctaacgacaacaacaacagtaactttccttggacagcggccagcaaatatcatctcaatggccgcgactcgctggtgaatccaggaccagctatggccagtcacaaaggacgatgaagaaaaatttttccctatgcacggcaatctaatatttggcaaagaagggacaacggcaagtaacgcagaattagataatgtaatgattacggatgaagaagagattcgtaccaccaatcctgtggcaacagagcagtatggaactgtggcaaataacttgcagagctcaaatacagctcccacgactagaactgtcaatgatcagggggccttacctggcatggtgtggcaagatcgtgacgtgtaccttcaaggacctatctgggcaaagattcctcacacggatggacactttcatccttctcctctgatgggaggctttggactgaaacatccgcctcctcaaatcatgatcaaaaatactccggtaccggcaaatcctccgacgactttcagcccggccaagtttgcttcatttatcactcagtactccactggacaggtcagcgtggaaattgagtgggagctacagaaagaaaacagcaaacgttggaatccagagattcagtacacttccaactacaacaagtctgttaatgtggactttactgtagacactaatggtgtttatagtgaacctcgccctattggaacccggtatctcacacgaaacctgtaa

SEQ ID NO: 801 - DNA, 2211 bp, synthetic construct
  misc_feature 1..2211: note = Description of Artificial Sequence: Synthetic polynucleotide
  source 1..2211: mol_type = other DNA
atggctgctgacggttatcttccagattggctcgaggacaacctttctgaaggcattcgtgagtggtgggctctgaaacctggagtccctcaacccaaagcgaaccaacaacaccaggacgaccgtcggggtcttgtgcttccgggttacaaatacctcggacccggtaacggactcgacaaaggagagccggtcaacgaggcggacgcggcagccctcgaacacgacaaagcttacgaccagcagctcaaggccggtgacaacccgtacctcaagtacaaccacgccgacgccgagtttcaggagcgtcttcaagaagatacgtcttttgggggcaaccttggcagagcagtcttccaggccaaaaagaggatccttgagcctcttggtctggttgaggaagcagctaaaacggctcctggaaagaagaggcctgtagatcagtctcctcaggaaccggactcatcatctggtgttggcaaatcgggcaaacagcctgccagaaaaagactaaatttcggtcagactggcgactcagagtcagtcccagaccctcaacctctcggagaaccaccagcagcccccacaagtttgggatctaatacaatggcttcaggcggtggcgcaccaatggcagacaataacgagggtgccgatggagtgggtaattcctcaggaaattggcattgcgattcccaatggctgggcaacagagtcatcaccaccagcaccagaacctgggccctgcccacttacaacaaccatctctacaagcaaatctccagccaatcaggagcttcaaacgacaaccactactttggctacagcaccccttgggggtattttgactttaacagattccactgccacttctcaccacgtgactggcagcgactcattaacaacaactggggattccggcccaagaaactcagcttcaagctcttcaacatccaagttaaagaggtcacgcagaacgatggcacgacgactattgccaataaccttaccagcacggttcaagtgtttacggactcggagtatcagctcccgtacgtgctcgggtcggcgcaccaaggctgtctcccgccgtttccagcggacgtcttcatggtccctcagtatggatacctcaccctgaacaacggaagtcaagcggtgggacgctcatccttttactgcctggagtacttcccttcgcagatgctaaggactggaaataacttccaattcagctataccttcgaggatgtaccttttcacagcagctacgctcacagccagagtttggatcgcttgatgaatcctcttattgatcagtatctgtactacctgaacagaacgcaaggaacaacctctggaacaaccaaccaatcacggctgctttttagccaggctgggcctcagtctatgtctttgcaggccagaaattggctacctgggccctgctaccggcaacagagactttcaaagactgctaacgacaacaacaacagtaactttccttggacagcggccagcaaatatcatctcaatggccgcgactcgctggtgaatccaggaccagctatggccagtcacaaggacgatgaagaaaaatttttccctatgcacggcaatctaatatttggcaaagaagggacaacggcaagtaacgcagaattagataatgtaatgattacggatgaagaagagattcgtaccaccaatcctgtggcaacagagcagtatggaactgtggcaaataacttgcagagctcaaatacagctcccacgactagaactgtcaatgatcagggggccttacctggcatggtgtggcaagatcgtgacgtgtaccttcaaggacctatctgggcaaagattcctcacacggatggacactttcatccttctcctctgatgggaggctttggactgaaacatccgcctcctcaaatcatgatcaaaaatactccggtaccggcaaatcctccgacgactttcagcccggccaagtttgcttcatttatcactcagtactccactggacaggtcagcgtggaaattgagtgggagctacagaaagaaaacagcaaacgttggaatccagagattcagtacacttccaactacaacaagtctgttaatgtggactttactgtagacactaatggtgtttatagtgaacctcgccctattggaacccggtatctcacacgaaacttgtaa

SEQ ID NO: 802 - DNA, 2211 bp, synthetic construct
  misc_feature 1..2211: note = Description of Artificial Sequence: Synthetic polynucleotide
  source 1..2211: mol_type = other DNA
atggctgctgacggttatcttccagattggctcgaggacaacctttctgaaggcattcgtgagtggtgggctctgaaacctggagtccctcaacccaaagcgaaccaacaacaccaggacgaccgtcggggtcttgtgcttccgggttacaaatacctcggacccggtaacggactcgacaaaggagagccggtcaacgaggcggacgcggcagccctcgaacacgacaaagcttacgaccagcagctcaaggccggtgacaacccgtacctcaagtacaaccacgccgacgccgagtttcaggagcgtcttcaagaagatacgtcttttgggggcaaccttggcagagcagtcttccaggccaaaaagaggatccttgagcctcttggtctggttgaggaagcagctaaaacggctcctggaaagaagaggcctgtagatcagtctcctcaggaaccggactcatcatctggtgttggcaaatcgggcaaacagcctgccagaaaaagactaaatttcggtcagactggcgactcagagtcagtcccagaccctcaacctctcggagaaccaccagcagcccccacaagtttgggatctaatacaatggcttcaggcggtggcgcaccaatggcggacaataacgagggtgccgatggagtgggtaattcctcaggaaattggcattgcgattcccaatggctgggcgacagagtcatcaccaccagcaccagaacctgggccctgcccacttacaacaaccatctctacaagcaaatctccagccaatcaggagcttcaaacgacaaccactactttggctacagcaccccttgggggtattttgactttaacagattccactgccacttctcaccacgtgactggcagcgactcattaacaacaactggggattccggcccaagaaactcagcttcaagctcttcaacatccaagttaaagaggtcacgcagaacgatggcacgacgactattgccaataaccttaccagcacggttcaagtgtttacggactcggagtatcagctcccgtacgtgctcgggtcggcgcaccaaggctgtctcccgccgtttccagcggacgtcttcatggtccctcagtatggatacctcaccctgaacaacggaagtcaagcggtgggacgctcatccttttactgcctggagtacttcccttcgcagatgctaaggactggaaataacttccaattcagctataccttcgaggatgtaccttttcacagcagctacgctcacagccagagtttggatcgcttgatgaatcctcttattgatcagtatctgtactacctgaacagaacgcaaggaacaacctctggaacaaccaaccaatcacggctgctttttagccaggctgggcctcagtctatgtctttgcaggccagaaattggctacctgggccctgctaccggcaacagagactttcaaagactgctaacgacaacaacaacagtaactttccttggacagcggccagcaaatatcatctcaatggccgcgactcgctggtgaatccaggaccagctatggccagtcacaaggacgatgaagaaaaatttttccctatgcacggcaatctaatatttggcaaagaagggacaacggcaagtaacgcagaattagataatgtaatgattacggatgaagaagagattcgtaccaccaatcctgtggcaacagtgcagtatggaactgtggcaaataacttgcagagctcaaatacagctcccacgactagaactgtcaatgatcagggggccttacctggcatggtgtggcaagatcgtgacgtgtaccttcaaggacctatctgggcaaagattcctcacacggatggacactttcatccttctcctctgatgggaggctttggactgaaacatccgcctcctcaaatcatgatcaaaaatactccggtaccggcaaatcctccgacgactttcagcccggccaagtttgcttcatttatcactcagtactccactggacaggtcagcgtggaaattgagtgggagctacagaaagaaaacagcaaacgttggaatccagagattcagtacacttccaactacaacaagtctgttaatgtggactttactgtagacactaatggtgtttatagtgaacctcgccctattggaacccggtatctcacacgaaacttgtaa

SEQ ID NO: 803 - DNA, 2211 bp, synthetic construct
  misc_feature 1..2211: note = Description of Artificial Sequence: Synthetic polynucleotide
  source 1..2211: mol_type = other DNA
atggctgctgacggttatcttccagattggctcgaggacaacctttctgaaggcattcgtgagtggtgggctctgaaacctggagtccctcaacccaaagcgaaccaacaacaccaggacaaccgtcggggtcttgtgcttccgggttacaaatacctcggacccggtaacggactcgacaaaggagagccggtcaacgaggcggacgcggcagccctcgaacacgacaaagcttacgaccagcagctcaaggccggtgacaacccgtacctcaagtacaaccacgccgacgccgagtttcaggagcgtcttcaagaagatacgtcttttgggggcaaccttggcagagcagtcttccaggccaaaaaggggatccttgagcctcttggtctggttgaggaagcagctaaaacggctcctggaaagaagaggcctgtagatcagtctcctcaggaaccggactcatcatctggtgttggcaaatcgggcaaacagcctgccagaaaaagactaaatttcggtcagactggcgactcagagtcagtcccagaccctcaacctctcggagaaccaccagcagcccccacaagtttgggatctaatacaatggcttcaggcggtggcgcaccaatggcagacaataacgagggtgccgatggagtgggtaattcctcaggaaattggcattgcgattcccaatggctgggcgacagagtcatcaccaccagcaccagaacctgggccctgcccacttacaacaaccatctctacaagcaaatctccagccaatcaggagcttcaaacgacaaccactactttggctacagcaccccttgggggtattttgactttaacagattccactgccacttctcaccacgtgactggcagcgactcattaacaacaactggggattccggcccaagaaactcagcttcaagctcttcaacatccaagttaaagaggtcacgcagaacgatggcacgacgactattgccaataaccttaccagcacggttcaagtgtttacggactcggagtatcagctcccgtacgtgttcgggtcggcgcaccaaggctgtctcccgccgtttccagcggacgtcttcatggtccctcagtatggatacctcaccctgaacaacggaagtcaagcggtgggacgctcatccttttactgcctggagtacttcccttcgcagatgctaaggactggaaataacttccaattcagctataccttcgaggatgtaccttttcacagcagctacgctcacagccagagttcggatcgcttgatgaatcctcttattgatcagtatctgtactacctgaacagaacgcaaggaacaacctctggaacaaccaaccaatcacggctgctttttagccaggctgggcctcagtctatgtctttgcaggccagaaattggctacctgggccctgctaccggcaacagagactttcaaagactgctaacgacaacaacaacagtaactttccttgaacagcggccagcaaatatcatctcaatggccgcgactcgctggtgaatccaggaccagctatggccagtcacaaggacgatgaagaaaaatttttccctatgcacggcaatctaatatttggcaaagaagggacaacggcaagtaacgcagaattagataatgtaatgattacggatgaagaagagattcgtaccaccaatcctgtggcaacagagcagtatggaactgtggcaaataacttgcagagctcaaatacagctcccacgactagaactgtcaatgatcagggggccttacctggcatggtgtggcaagatcgtgacgtgtaccttcaaggacctatctgggcaaagattcctcacacggatggacactttcatccttctcctctgatgggaggctttggactgaaacatccgcctcctcaaatcatgatcaaaaatactccggtaccggcaaatcctccgacgactttcagcccggccaagtttgcttcatttatcactcagtactccactggacaggtcagcgtggaaattgagtgggagctacagaaagaaaacagcaaacgttggaatccagagattcagtacacttccaactacaacaagtctgttaatgtggactttactgtagacactaatggtgtttatagtgaacctcgccctattggaacccggtatctcacacgaaacttgtaa

SEQ ID NO: 804 - DNA, 2211 bp, synthetic construct
  misc_feature 1..2211: note = Description of Artificial Sequence: Synthetic polynucleotide
  source 1..2211: mol_type = other DNA
atggctgctgacggttatcttccagattggctcgaggacaacctttctgaaggcattcgtgagtggtgggctctgaaacctggagtccctcaacccaaagcgaaccaacaacaccaggacaaccgtcggggtcttgtgcttccgggttacaaatacctcggacccggtaacggactcgacgaaggagagccggtcaacgaggcggacgcggcagccctcgaacacgacaaagcttacgaccagcagctcaaggccggtgacaacccgtacctcaagtacaaccacgccgacgccgagtttcaggagcgtcttcaagaagatacgtcttttgggggcaaccttggcagagcagtcttccaggccaaaaagaggatccttgagcctcttggtctggttgagggagcagctaaaacggctcctggaaagaagaggcctgtagatcagtctcctcaggaaccggactcatcatctggtgttggcaaatcgggcaaacagcctgccagaaaaagactaaatttcggtcagactggcgactcagagtcagtcccagaccctcaacctctcggagaaccaccagcagcccccacaagtttgggatctaatacaatggcttcaggcggtggcgcaccaatggcagacaataacgagggtgccgatggagtgggtaattcctcaggaaattggcattgcgattcccaatggctgggcgacagagtcatcaccaccagcaccagaacctgggccctgcccacttacaacagccacctctacaagcaaatctccagccaatcaggagcttcaaacgacaaccactactttggctacagcaccccttgggggtattttgactttaacagattccactgccacttctcaccacgtgactggcagcgactcattaacaacaactggggattccggcccaagaaactcagcttcaagctcttcaacatccaagttaaagaggtcacgcagaacgatggcacgacgactattgccaataaccttaccagcacggttcaagtgtttacggactcggagtatcagctcccgtacgtgctcgggtcggcgcaccaaggctgtctcccgccgtttccagcggacgtcttcatggtccctcagtatggatacctcaccctgaacaacggaagtcaagcggtgggacgctcatccttttactgcctggagtacttcccttcgcagatgctaaggactggaaataacttccaattcagctataccttcgaggatgtaccttttcacagcagctacgctcacagccagagtttggatcgcttgatgaatcctcttattgatcagtatctgtactacctgaacagaacgcaaggaacaacctctggaacaaccaaccaatcacggctgctttttagccaggctgggcctcagtctatgtctttgcaggccagaaattggctacctgggccctgctaccggcaacagagactttcaaagactgctaacgacaacaacaacagtaactttccttggacagcggccagcaaatatcatctcaatggccgcgactcgctggtgaatccaggaccagctatggccagtcacaaggacgatgaagaaaaatttttccctatgcacggcaatctaatatttggcaaagaagggacaacggcaagtaacgcagaattagataatgtaatgattacggatgaagaagagattcgtaccaccaatcctgtggcaacagagcagtatggaactgtggcaaataacttgcagagctcaaatacagctcccacgactagaactgtcaatgatcagggggccttacctggcatggtgtggcaagatcgtgacgtgtaccttcaaggacctatctgggcaaagattcctcacacggatggacactttcatccttctcctctgatgggaggctttggactgaaacatccgcctcctcaaatcatgatcaaaaatactccggtaccggcaaatcctccgacgactttcagcccggccaagtttgcttcatttatcactcagtactccactggacaggtcagcgtggaaattgagtgggagctacagaaagaaaacagcaaacgttggaatccagagattcagtacacttccaactacaacaagtctgttaatgtggactttactgtagacactaatggtgtttatagtgaacctcgccctattggaacccggtatctcacacgaaacttgtaa

SEQ ID NO: 805 - DNA, 2211 bp, synthetic construct
  misc_feature 1..2211: note = Description of Artificial Sequence: Synthetic polynucleotide
  source 1..2211: mol_type = other DNA
atggctgctgacggttatcttccagattggctcgaggacaacctttctgaaggcattcgtgagtggtgggctctgaaacctggagtccctcaacccaaagcgaaccaacaacaccaggacaaccgtcggggtcttgtgcttccgggttacaaatacctcggacccggtaacggactcgacaaaggagagccggtcaacgaggcggacgcggcagccctcgaacacgacaaagcttacgaccagcagctcaaggccggtgacaacccgtacctcaagtacaaccacgccgacgccgagtttcaggagcgtcttcaagaagatacgtcttttgggggcaaccttggcagagcagtcttccaggccaaaaagaggatccttgagcctcttggtctggttgagggagcagctaaaacggctcctggaaagaagaggcctgtagatcagtctcctcaggaaccggactcatcatctggtgttggcaaatcgggcaaacagcctgccagaaaaagactaaatttcggtcagactggcgactcagagtcagtcccagaccctcaacctctcggagaaccaccagcagcccccacaagtttgggatctaatacaatggcttcaggcggtggcgcaccaatggcagacaataacgagggtgccgatggagtgggtaattcctcaggaaattggcattgcgattcccaatggctgggcgacagagtcatcaccaccagcaccagaacctgggccctgcccacttacaacagccatctctacaagcaaatctccagccaatcaggagcttcaaacgacaaccactactttggctacagcaccccttggggtattttgactttaacagattccactgccacttctcaccacgtgactggcagcgactcattaacaacaactggggattccggcccaagaaactcagcttcaagctcttcaacatccaagttaaagaggtcacgcagaacgatggcacgacgactattgccaataaccttaccagcacggttcaagtgtttacggactcggagtatcagctcccgtacgtgctcgggtcggcgcaccaaggctgtctcccgccgtttccagcggacgccttcatggtccctcagtatggatacctcaccctgaacaacggaagtcaagcggtgggacgctcatccttttactgcctggagtacttcccttcgcagatgctaaggactggaaataacttccaattcagctataccctcgaggatgtaccttttcacagcagctacgctcacagccagagtttggatcgcttgatgaatcctcttattgatcagtatctgtactacctgaacagaacgcaaggaacaacctctggaacaaccaaccaatcacggctgctttttagccaggctgggcctcagtctatgtctttgcaggccagaaattggctacctgggccctgctaccggcaacagagactttcaaagactgctaacgacaacaacaacagtaactttccttggacagcggccagcaaatatcatctcaatggccgcgactcgctggtgaatccaggaccagctatggccagtcacaaaggacgatgaagaaaaatttttccctatgcacggcaatctaatatttggcaaagaagggacaacggcaagtaacgcagaattagatagtgtaatgattacggatgaagaagagattcgtaccaccaatcctgtggcaacagagcagtatggaactgtggcaaataacttgcagagctcaaatacagctcccacgactagaactgtcaatgatcagggggccttacctggcatggtgtggcaagatcgtgacgtgtaccttcaaggacctatctgggcaaagattcctcacacggatggacactttcatccttctcctctgatgggaggctttggactgaaacatccgcctcctcaaatcatgatcaaaaatactccggtaccggcaaatcctccgacgactttcagcccggccaagtttgcttcatttatcactcagtactccactggacaggtcagcgtggaaattgagtgggagctacagaaagaaaacagcaaacgttggaatccagagattcagtacacttccaactacaacaagtctgttaatgtggactttactgtagacactaatggtgtttatagtgaacctcgccctattggaacccggtatctcacacgaaacttgtaa

SEQ ID NO: 806 - DNA, 2205 bp, synthetic construct
  misc_feature 1..2205: note = Description of Artificial Sequence: Synthetic polynucleotide
  source 1..2205: mol_type = other DNA
atgactgacggttaccttccagattggctagaggacaacctctctgagggcgttcgagagtggtgggcgctgcaacctggagcccctaaacccaaggcaaatcaacaacatcaggacaacgctcggggtcttgtgcttccgggttacaaatacctcggacccggcaacggactcgacaagggggaacccgtcaacgcagcggacgcggcagccctcgagcacgacaaggcctacgaccagcagctcaaggccggtgacaacccctacctcaagtacaaccacgccgacgcggagttccagcagcggcttcagggcgacacatcgtttgggggcaacctcggcagagcagtcttccaggccaaaaagagggttcttgaacctcttggtctggttgagcaagcgggtgagacggctcctggaaagaagagaccgttgattgaatccccccagcagcccgactcctccacgggtatcggcaaaaaaggcaagcagccggctaaaaagaagctcgttttcgaagacgaaactggagcaggcgacggaccccctgagggatcaacttccggagccatgtctgatgacagtgagatgcgtgcagcaactggcggagctgcagtcgagggcggacaaggtgccgatggagtgggtaatgcctcgggtgattggcattgcgattccacctggtctgagggccacgtcacgaccaccagcaccagaacctgggtcttgcccacctacaacaaccacctctacaagcgactcggagagagcctgcagtccaacacctacaacggattctccaccccctggggatactttgacttcaaccgcttccactgccacttctcaccacgtgactggcagcgactcatcaacaacaactggggcatgcgacccaaagccatgcgggtcaaaatcttcaacatccaggtcaaggaggtcacgacgtcgaacggcgagacaacggtggctaataaccttaccagcacggttcagatctttgcggactcgtcgtacgaactgccgtacgtgatggatgcgggtcaagagggcagcctgcctccttttcccaacgacgtctttatggtgccccagtacggctactgtggactggtgaccggcaacacttcgcagcaacagactgacagaaatgccttctactgcctggagtactttccttcgcagatgctgcggactggcaacaactttgaaattacgtacagttttgagaaggtgcctttccactcgatgtacgcgcacagccagagcctggaccggctgatgaaccctctcatcgaccagtacctgtggggactgcaatcgaccaccaccggaaccaccctgaatgccgggactgccaccaccaactttaccaagctgcggcctaccaacctttccaactttaaaaagaactggctgcccgggccttcaatcaagcagcagggcttctcaaagactgccaatcaaaactacaagatccctgccaccgggtcagacagtctcatcaaatacgagacgcacagcactctggacggaagatggagtgccctgacccccggacctccaatggccacggctggacctgcggacagcaagttcagcaacagccagctcatctttgcggggcctaaacagaacggcaacacggccaccgtacccgggactctgatcttcacctctgaggaggagctggcagccaccaacgctaccgatacggacatgtggggcaacctacctggcggtgaccagagcaacagcaacctgccgaccgtggacagactgacagccttgggagccgtgcctggaatggtctggcaaaacagagacatttactaccagggtcccatttgggccaagattcctcataccgatggacactttcacccctcaccgctgattggtgggtttgggctgaaacacccgcctcctcaaatttttatcaagaacaccccggtacctgcgaatcctgcgacgaccttcagctctactccggtaaactccttcattactcagtacagcactggccaggtgtcggtgcagattgactgggagatccagaaggagcggtccaaacgctggaaccccgaggtccagtttacctccaactacggacagcaaaactctctgttgtgggctcccgatgcggctgggaaatacactgagcctagggctatcggtacccgctacctcacccaccacctgtaa

SEQ ID NO: 807 - DNA, 2205 bp, synthetic construct
  misc_feature 1..2205: note = Description of Artificial Sequence: Synthetic polynucleotide
  source 1..2205: mol_type = other DNA
atgactgacggttaccttccagattggctagaggacaacctctctgaaggcgttcgagagtggtgggcgctgcaacctggagcccctaaacccaaggcaaatcaacaacatcaggacaacgctcggggtcttgtgcttccgggttacaaatacctcggacccggcaacggactcgacaagggggaacccgtcaacgcagcggacgcggcagccctcgagcacgacaaggcctacgaccagcagctcaaggccggtgacaacccctacctcaagtacaaccacgccgacgcggagttccagcagcggcttcagggcgacacatcgtttgggggcaacctcggcagagcagtcttccaggccaaaaagagggttcttgaacctcttggtctggttgagcaagcgggtgagacggctcctggaaagaagagaccgttgattgaatccccccagcagcccgactcctccacgggtatcggcaaaaaaggcaagcagccggctaaaaagaagctcgttttcgaagacgaaactggagcaggcgacggaccccctgagggatcaacttccggagccatgtctgatgacagtgagatgcgtgcagcagctggcggagctgcagtcgagggcggacaaggtgccgatggagtgggtaatgcctcgggtgattggcattgcgattccacctggtctgagggccacgtcacgaccaccagcaccagaacctgggtcttgcccacctacaacaaccacctctacaagcgactcggagagagcctgcagtccaacacctacaacggattctccaccccctggggatactttgacttcaaccgcttccactgccacttcttaccacgtgactggcagcgactcatcaacaacaactggggcgtgcgacccaaagccatgcgggtcaaaatcttcaacatccaggtcaaggaggtcacgacgtcgaacggcgagacaacggtggctaataaccttaccagcacggttcagatctttgcggactcgtcgtacgaactgccgtacgtgatggatgcgggtcaagagggcagcctgcctccttttcccaacgacgtctttatggtgccccagtacggctactgtggactggtgaccggcgacacttcgcagcaacagactgacagaaatgccttctactgcctggagtactttccttcgcagatgctgcggactggcaacaactttgaaattacgtacagttttgagaaggtgcctttccactcgatgtacgcgcacagccagagcctggaccggctgatgaaccctctcatcgaccagtacctgtggggactgcaatcgaccaccaccggaaccaccctgaatgccgggactgccaccaccaactttaccaagctgcggcctaccaacttttccaactttaaaaagaactggctgcccgggccttcaatcaagcagcagggcttctcaaagactgccaatcaaaactacaagatccctgccaccgggtcagacagtctcatcaaatacgagacgcacagcactctggacggaagatggagtgccctgacccccggacctccaatggccacggctggacctgcggacagcaagttcagcaacagccagctcatctttgcggggcctaaacagaacggcaacacggccaccgtacccgggactctgatcttcacctctgaggaggagctggcagccaccaacgccaccgatacggacatgtggggcaacctacctggcggtgaccagagcaacagcaacctgccgaccgtggacagactgacagccttgggagccgtgcctggaatggtctggcaaaacagagacatttactaccagggtcccatttgggccaagattcctcataccgatggacactttcacccctcaccgctgattggtgggtttgggctgaaacacccgcctcctcaaatttttatcaagaacaccccggtacctgcgaatcctgcgacgaccttcagctctactccggtaaactccttcattactcagtacagcactggccaggtgtcggtgcagattgactgggagatccagaaggagcggtccaaacgctggaaccccgaggtccagtttacctccaactacggacagcaaaactctctgttgtgggctcccgatgcggctgggaaatacactgagcctagggctatcggtacccgctacctcacccaccacctgtaa

SEQ ID NO: 808 - DNA, 2205 bp, synthetic construct
  misc_feature 1..2205: note = Description of Artificial Sequence: Synthetic polynucleotide
  source 1..2205: mol_type = other DNA
atgactgacggttaccttccagattggctagaggacaacctctctgaaggcgttcgagagtggtgggcgctgcaacctggagcccctaaacccaaggcaaatcaacaacatcaggacaacgctcggggtcttgtgcttccgggttacaaatacctcggacccggcaacggactcgacgagggggaacccgtcaacgcagcggacgcggcagccctcgagcacgacaaggcctacgaccagcagctcaaggccggtgacaacccctacctcaagtacaaccacgccgacgcggagttccagcagcggcttcagggcgacacatcgtttgggggcaacctcggcagagcagtcttccaggccaaaaagagggttcttgaacctcttggtctggttgagcaagcgggtgagacggctcctggaaagaagagaccgttgattgaatccccccagcagcccgactcctccacgggtatcggcaaaaaaggcaagcagccggctaaaaagaagctcgttttcgaagacgaaactggagcaggcgacggaccccctgagggatcaacttccggagccatgtctgatgacagtgagatgcgtgcagcagctggcggagctgcagtcgagggcggacaaggtgccgatggagtgggtaatgcctcgggtgattggcattgcgattccacctggtctgagggccacgtcacgaccaccagcaccagaacctgggtcttgcccacctacaacaaccacctctacaagcgactcggagagagcctgcagtccaacacctacaacggattctccaccccctggggatactttgacttcaaccgcttccactgccacttctcaccacgtgactggcagcgactcatcaacaacaactggggcatgcgacccaaagccatgcgggtcaaaatcttcaacatccaggtcaaggaggtcacgacgtcgaacggcgagacaacggtggctaataaccttaccagcacggttcagatctttgcggactcgtcgtacgaactgccgtacgtgatggatgcgggtcaagagggcagcctgcctccttttcccaacgacgtctttatggtgccccagtacggctactgtggactggtgaccggcaacacttcgcagcaacagactgacagaaatgccttctactgcctggagtactttccttcgcagatgctgcggactggcaacaactttgaaattacgtacagttttgagaaggtgcctttccactcgatgtacgcgcacagccagagcctggaccggctgatgaaccctctcatcgaccagtacctgtggggactgcaatcgaccaccaccggaaccaccctgaatgccgggactgccaccaccaactttaccaagctgcggcctaccaacttttccaactttaaaaagaactggctgcccgggccttcaatcaagcagcagggcttctcaaagactgccaatcaaaactacaagatccctgccaccgggtcagacagtctcatcaaatacgagacgcacagcactctggacggaagatggagtgccctgacccccggacctccaatggccacggctggacctgcggacagcaagttcagcaacagccagctcatctttgcggggcctaaacagaacggcaacacggccaccgtacccgggactctgatcttcacctctgaggaggagctggcagccaccaacgctaccgatacggacatgtggggcaacctacctggcggtgaccagagcaacagcaacctgccgaccgtggacagactgacagccttgggagccgtgcctggaatggtctggcaaaacagagacatttactaccagggtcccatttgggccaagattcctcataccgatggacactttcacccctcaccgctgattggtgggtttgggctgaaacacccgcctcctcaaatttttatcaagaacaccccggtacctgcgaatcctgcgacgaccttcagctctactccggtaaactccttcattactcagtacagcactggccaggtgtcggtgcagattgactgggagatccagaaggagcggtccaaacgctggaaccccgaggtccagtttacctccaactacggacagcaaaactctctgttgtgggctcccgatgcggctgggaaatacactgagcctagggctatcggtacccgctacctcacccaccacctgtaa

SEQ ID NO: 809 - DNA, 2205 bp, synthetic construct
  misc_feature 1..2205: note = Description of Artificial Sequence: Synthetic polynucleotide
  source 1..2205: mol_type = other DNA
atgactgacggttaccttccagattggctagaggacaacctctctgaaggcgttcgagagtggtgggcgctgcaacctggagcccctaaacccaaggcaaatcaacaacatcaggacaacgctcggggtcttgtgcttccgggttacaaatacctcggacccggcaacggactcgacaagggggaacccgtcaacgcagcggacgcggcagccctcgagcacgacaaggcctacgaccagcagctcaaggccggtgacaacccctacctcaagtacaaccacgccgacgcggagttccagcagcggcttcagggcgacacatcgtttgggggcaacctcggcagagcagtcttccaggccaaaaagagggttcttgaacctcttggtctggttgagcaagcgggtgagacggctcctggaaagaagagaccgttgattgaatccccccagcagcccgactcctccacgggtatcggcaaaaaaggcaagcagccggctaaaaagaagctcgttttcgaagacggaactggagcaggcgacggaccccctgagggatcaacttccggagccatgtctgatgacagtgagatgcgtgcagcagctggcggagctgcagtcgagggcggacaaggtgccgatggagtgggtaatgcctcgggtgattggcattgcgattccacctggtctgagggccacgtcacgaccaccagcaccagaacctgggtcttgcccacctacaacaaccacctctacaagcgactcggagagagcctgcagtccaacacctacaacggattccccaccccctggggatactttgacttcaaccgcttccactgccacttctcaccacgtgactggcagcgactcatcaacaacaactggggcatgcgacccaaagccatgcgggtcaaaatcttcaacatccaggtcaaggaggtcacgacgtcgaacggcgagacaacggcggctaataaccttaccagcacggttcagatctttgcggactcgtcgtacgaactgccgtacgtgatggatgcgggtcaagagggcagcctgcctccttttcccaacgacgtctttatggtgccccagtacggctactgtggactggtgaccggcaacacttcgcagcaacagactgacagaaatgccttctactgcctggagtactttccttcgcagatgctgcggactggcaacaactttgaaattacgtacagttttgagaaggtgcctttccactcgatgtacgcgcacagccagagcctggaccggctgatgaaccctctcatcgaccagtacctgtggggactgcaatcgaccaccaccggaaccaccctgaatgccgggactgccaccaccaactttaccaagctgcggcctaccaacttttccaactttaaaaagaactggctgcccgggccttcaatcaagcagcagggcttctcaaagactgccaatcaaaactacaagatccctgccaccgggtcagacagtctcatcaaatacgagacgcacagcactctggacggaagatggagtgccctgacccccggacctccaatggccacggctggacctgcggacagcaagttcagcaacagccagctcatctttgcggggcctaaacagaacggcaacacggccaccgtacccgggactctgatcttcacctctgaggaggagctggcagccaccaacgccaccgatacggacatgtggggcaacctacctggcggtgaccagagcaacagcaacctgccgaccgtggacagactgacagccttgggagccgtgcctggaatggtctggcaaaacagagacatttactaccagggtcccatttgggccaagattcctcataccgatggacactttcacccctcaccgctgattggtgggtttgggctgaaacacccgcctcctcaaatttttatcaagaacaccccggtacctgcgaatcctgcgacgaccttcagctctactccggtaaactccttcattactcagtacagcactggccaggtgtcggtgcagattgactgggagatccagaaggagcggtccaaacgctggaaccccgaggtccagtttacctccaactacggacagcaaaactctctgttgtgggctcccgatgcggctgggaaatacactgagcctagggctatcggtacccgctacctcacccaccacctgtaa

SEQ ID NO: 810 - DNA, 2205 bp, synthetic construct
  misc_feature 1..2205: note = Description of Artificial Sequence: Synthetic polynucleotide
  source 1..2205: mol_type = other DNA
atgactgacggttaccttccagattggctagaggacaacctctctgaaggcgttcgagagtggtgggcgctgcaacctggagcccctaaacccaaggcaaatcaacaacatcaggacaacgctcggggtcttgtgcttccgggttacaaatacctcggacccggcaacggactcgacaagggggaacccgtcaacgcagcggacgcggcagccctcgagcacgacaaggcctacgaccagcagctcaaggccggtgacaacccctacctcaagtacaaccacgccgacgcggagttccagcagcggcttcagggcgacacatcgtttgggggcaacctcggcagagcagtcttccaggccaaaaagagggttcttgaacctcttggtctggttgagcaagcgggtgagacggctcctggaaagaagagaccgttgattgaatccccccagcagcccgactcctccacgggtatcggcaaaaaaggcaagcagccggctaaaaagaagctcgttttcgaagacgaaactggagcaggcgacggaccccctgagggatcaacttccggagccatgtctgatgacagtgagatgcgtgcagcagctggcggagctgcagtcgagggcggacaaggtgccgatggagtgggtaatgcctcgggtgattggcattgcgattccacctggtctgagggccacgtcacgaccaccagcaccagaacctgggtcttgcccacctacaacaaccacctctacaagcgactcggagagagcctgcagtccaacacctacaacggattctccaccccctggggatactttgacttcaaccgcttccactgccacttctcaccacgtgactggcagcgactcatcaacaacaactggggcatgcgacccaaagccatgcgggtcaaaatcttcaacatccaggtcaaggaggtcacgacgtcgaacggcgagacaacggtggctaataaccttaccagcacggttcagatctttgcggactcgtcgtacgaactgccgtacgtgatggatgcgggtcaagagggcagcctgcctccttttcccaacgacgtctttatggtgccccagtacggctaccgtggactggtgaccggcaacacttcgcagcaacagactgacagaaatgccttctactgcctggagtactttccttcgcagatgctgcggactggcaacaactttgaaattacgtacagttttgagaaggtgcctttccactcgatgtacgcgcacagccagagcctggaccggctgatgaaccctctcatcgaccagtacctgtggggactgcaatcgaccaccaccggaaccaccctgaatgccgggactgccaccaccaactttaccaagctgcggcctaccaacttttccaactttaaaaagaactggctgcccgggccttcaatcaagcagcagggcttctcaaagactgccaatcaaaactacaagatccctgccaccgggtcagacagtctcatcaaatacgagacgcacagcactctggacggaagatggagtgccctgacccccggacctccaatggccacggctggacctgcggacagcaagttcagcaacagccagctcatctttgcggggcctaaacagaacggcaacacggccaccgtacccgggactctgatcttcacctctgaggaggagctggcagccaccaacgccaccgatacggacatgtggggcaacctacctggcggtgaccagagcaacagcaacctgccgaccgtggacagactgacagccttgggagccgtgcctggaatggtctggcaaaacagagacatttactaccagggtcccatttgggccaagattcctcataccgatggacactttcacccctcaccgctgattggtgggtttgggctgaaacacccgcctcctcaaatttttatcaagaacaccccggtacctgcgaatcctgcgacgaccttcagctctactccggtaaactccttcattactcagtacagcactggccaggtgtcggtgcagattgactgggagatccagaaggagcggtccaaacgctggaaccccgaggtccagtttacctccaactacggacagcaaaactctctgttgtgggctcccgatgcggctgggaaatacactgagcctagggctatcggtacccgctacctcacccaccacctgtaa

SEQ ID NO: 811 - DNA, 2205 bp, synthetic construct
  misc_feature 1..2205: note = Description of Artificial Sequence: Synthetic polynucleotide
  source 1..2205: mol_type = other DNA
atgactgacggttaccttccagattggctagaggacaacctctctgaaggcgttcgagagtggtgggcgctgcaacctggagcccctaaacccaaggcaaatcaacaacatcaggacaacgctcggggtcttgtgcttcagggttacaaatacctcggacccggcaacggactcgacaagggggaacccgtcaacgcagcggacgcggcagccctcgagcacgacaaggcctacgaccagcagctcaaggccggtgacaacccctacctcaagtacaaccacgccgacgcggagttccagcagcggcttcagggcgacacatcgtttgggggcaacctcggcagagcagtcttccaggccaaaaagagggttcttgaaccccttggtctggttgagcaagcgggtgagacggctcctggaaagaagagaccgttgattgaatccccccagcagcccgactcctccacgggtatcggcaaaaaaggcaagcagccggctaaaaagaagctcgttttcgaagacgaaactggagcaggcgacggaccccctgagggatcaacttccggagccatgtctgatgacagtgagatgcgtgcagcagctggcggagctgcagtcgagggcggacaaggtgccgatggagtgggtaatgcctcgggtgattggcattgcgattccacccggtctgagggccacgtcacgaccaccagcaccagaacctgggtcttgcccacctacaacaaccacctctacaagcgactcggagagagcctgcagtccaacacctacaacggattctccaccccctggggatactttgacttcaaccgcttccactgccacttctcaccacgtgactggcagcgactcatcaacaataactggggcatgcgacccaaagccatgcgggtcaaaatcttcaacatccaggtcaaggaggtcacgacgtcgaacggcgagacaacggtggctaataaccttaccagcacggttcagatctttgcggactcgtcgtacgaactgccgtacgtgatggatgcgggtcaagagggcagcctgcctccttttcccaacgacgtctttatggtgccccagtacggctactgtggactggtgaccggcaacacttcgcagcaacagactgacagaaatgccttctactgcctggagtactttccttcgcagatgctgcggactggcaacaactttgaaattacgtacagttttgagaaggtgcctttccactcgatgtacgcgcacagccagagcctggaccggctgatgaaccctctcatcgaccagtacctgtggggactgcaatcgaccaccaccggaaccaccctgaatgccgggactgccaccaccaactttaccaagctgcggcctaccaacttttccaactttaaaaagaactggctgcccgggccttcaatcaagcagcagggcttctcaaagactgccaatcaaaactacaagatccctgccaccgggtcagacagtctcatcaaatacgagacgcacagcactctggacggaagatggagtgcccggacccccggacctccaatggccacggctggacctgcggacagcaagttcagcaacagccagctcatctttgcggggcctaaacagaacggcaacacggccaccgtacccgggactctgatcttcacctctgaggaggagctggcagccaccaacgccaccgatacggacatgtggggcaacctacctggcggtgaccagagcaacagcaacctgccgaccgtggacagactgacagccttgggagccgtgcctggaatggtctggcaaaacagagacatttactaccagggtcccatttgggccaagattcctcataccgatggacactttcacccctcaccgctgattggtgggtttgggctgaaacacccgcctcctcaaatttttatcaagaacaccccggtacctgcgaatcctgcgacgaccttcagctctactccggtaaactccttcattactcagtacagcactggccaggtgtcggtgcagattgactgggagatccagaaggagcggtccaaacgctggaaccccgaggtccagtttacctccaactacggacagcaaaactctctgttgtgggctcccgatgcggctgggaaatacactgagcctagggctatcggtacccgctacctcacccaccacctgtaa

SEQ ID NO: 812 - DNA, 2175 bp, synthetic construct
  misc_feature 1..2175: note = Description of Artificial Sequence: Synthetic polynucleotide
  source 1..2175: mol_type = other DNA
atgtcttttgttgatcaccctccagattggttggaagaagttggtgaaggtcttcgcgagtttttgggccttgaagcgggcccaccgaaaccaaaacccaatcagcagcatcaagatcaagcccgtggtcttgtgctgcctggttataactatctcggacccggaaacggtctcgatcgaggagagcctgtcaacagggcagacgaggtcgcgcgagagcacgacatctcgtacaacgagcagcttgaggcgggagacaacccctacctcaagtacaaccacgcggacgccgagtttcaggagaggctcgccgacgacacatccttcgggggaaacctcggaaaggcagtctttcaggccaagaaaagggttctcgaaccttttggcctggttgaagagggtgctaagacggcccctaccggaaagcggatagacgaccactttccaaaaagaaagaaggcccggaccgaagaggactccaagccttccacctcgtcagacgccgaagctggacccagcggatcccagcagctgcaaatcccagcccaaccagcctcaagtttgggagctgatacaatgtctgcgggaggtggcggcccattgggcgacaataaccaaggtgccgatggagtgggcaatgcctcgggagattggcattgcgattccacgtggatgggggacagagtcgtcaccaagtccacccgaacctgggtgctgcccagctacaacaaccaccagtaccgagagatcaaaagcggctccgtcgacggaagcaacgccaacgcctactttggatacagcaccccctgggggtactttgactttaaccgcttccacagccactggagcccccgagactggcaaagactcatcaacaactactggggcttcagaccccggtccctcagagtcaaaatcttcaacattcaagtcaaagaggtcacggtgcaggactccaccaccaccatcgccaacaacctcacctccaccgtccaagtgtttacggacgacgactaccagctgccctacgtcgtcggcaacgggaccgagggatgcctgccggccttccctccgcaggtctttacgctgccgcagtacggttacgcgacgctgaaccgcgacaacacagaaaatcccaccgagaggagcagcttcttctgcctagagtactttcccagcaagatgctgagaacgggcaacaactttgagtttacctacaactttgaggaggtgcccttccactccagcttcgctcccagtcagaacctcttcaagctggccaacccgctggtggaccagtacttgtaccgcttcgtgagcacaaataacactggcggagtccagttcaacaagaacctggccgggagatacgccaacacctacaaaaactggttcccggggcccatgggccgaacccagggctggaacctgggctccggggtcaaccgcgccagtgtcagcgccttcgccacgaccaataggatggagctcgagggcgcgagttaccaggtgcccccgcagccgaacggcatgaccaacaacctccagggcagcaacacctatgccctggagaacactatgatcttcaacagccagccggcgaacccgggcaccaccgccacgtacctcgagggcaacatgctcatcaccagcgagagcgagacgcagccggtgaaccgcgtggcgtacaacgtcggcgggcagatggccaccaacaaccagagctccaccactgcccccgcgaccggcacgtacaacctccaggaaatcgtgcccggcagcgtgtggatggagagggacgtgtacctccaaggacccatctgggccaagatcccagagacggaggcgcactttcacccctctccggccatgggcggattcggactcaaacacccaccgcccatgatgctcatcaagaacacgcctgtgcccggaaatatcaccagcttctcggacgtgcccgtcagcagcttcatcacccagtacagcaccgggcaggtcaccgtggagatggagtgggagctcaagaaggaaaactccaagaggtggaacccagagatccagtacacaaacaactacaacgacccccagtttgtggactttgccccggacagcaccggggaatacagaaccaccagacctatcggaacccgataccttacccgacccctttaa

SEQ ID NO: 813 - DNA, 2175 bp, synthetic construct
  misc_feature 1..2175: note = Description of Artificial Sequence: Synthetic polynucleotide
  source 1..2175: mol_type = other DNA
atgtcttttgttgatcaccctccagattggttggaagaagttggtgaaggtcttcgcgagtttttgggccttgaagcgggcccaccgaaaccaaaacccaatcagcagcatcaagatcaagcccgtggtcttgtgctgcctggttataactatctcggacccggaaacggtctcgatcgaggagagcctgtcaacagggcagacgaggtcgcgcgagagcacgacatctcgtacaacgagcagcttgaggcgggagacaacccctacctcaagtacaaccacgcggacgccgagtttcaggagaagctcgccgacgacacatcctccgggggaaacctcggaaaggcagtctttcaggccaagaaaagggttctcgaaccttttggcctggttgaagagggtgctaagacggcccctaccggaaagcggatagacgaccactttccaaaaagaaagaaggcccggaccgaagaggactccaagccttccacctcgtcagacgccgaagctggacccagcggatcccagcagctgcaaatcccagcccaaccagcctcaagtttgggagctgatacaatgtctgcgggaggtggcggcccattgggcgacaataaccaaggtgccgatggagtgggcaatgcctcgggagattggcattgcgattccacgtggatgggggacagagtcgtcaccaagtccacccgaacctgggtgctgcccagctacaacaaccaccagtaccgagagatcaaaagcggctccgtcgacggaagcaacgccaacgcctactttggatacagcaccccctgggggtactttgactttaaccgcttccacagccactggagcccccgagactggcaaagactcatcaacaactactggggcttcagaccccggtccctcagagtcaaaatcttcaacattcaagtcaaagaggtcacggtgcaggactccaccaccaccatcgccaacaacctcacctccaccgtccaagtgtttacggacgacgactaccagctgccctacgtcgtcggcaacgggaccgagggatgcctgccggccttccctccgcaggtctttacgctgccgcagtacggttacgcgacgctgaaccgcgacaacacagaaaatcccaccgagaggagcagcttcttctgcctagagtactttcccagcaagatgctgagaacgggcaacaactttgagtttacctacaactttgaggaggtgcccttccactccagcttcgctcccagtcagaacctcttcaagctggccaacccgctagtggaccagtacttgtaccgcttcgtgagcacaaataacactggcggagtccagttcaacaagaacctggccgggagatacgccaacacctacaaaaactggttcccggggcccatgggccgaacccagggctggaacctgggctccggggtcaaccgcgccagtgtcagcgccttcgccacgaccaataggatggagctcgagggcgcgagttaccaggtgcccccgcagccgaacggcatgaccaacaacctccagggcagcaacacctatgccctggagaacactatgatcttcaacagccagccggcgaacccgggcaccaccgccacgtacctcgagggcaacatgctcatcaccagcgagagcgagacgcagccggtgaaccgcgtggcgtacaacgtcggcgggcagatggccaccaacaaccagagctccaccactgcccccgcgaccggcacgtacaacctccaggaaatcgtgcccggcagcgtgtggatggagagggacgtgtacctccaaggacccatctgggccaagatcccagagacgggggcgcactttcacccctctccggccatgggcggattcggactcaaacacccaccgcccatgatgctcatcaagaacacgcctgtgcccggaaatatcaccagcttctcggacgtgcccgtcagcagcttcatcacccagtacagcaccgggcaggtcaccgtggagatggagtgggagctcaagaaggaaaactccaagaggtggaacccagagatccagtacacaaacaactacaacgacccccagtttgtggactttgccccggacagcaccggggaatacagaaccaccagacctatcggaacccgataccttacccgacccctttaa

SEQ ID NO: 814 - DNA, 2175 bp, synthetic construct
  misc_feature 1..2175: note = Description of Artificial Sequence: Synthetic polynucleotide
  source 1..2175: mol_type = other DNA
atgtcttttgttgatcaccctccagattggttggaagaagttggtgaaggtcttcgcgagtttttgggccttgaagcgggcccaccgaaaccaaaacccaatcagcagcatcaagatcaagcccgtggtcttgtgctgcctggttataactatctcggacccggaaacggtctcgatcgaggagagcctgtcaacagggcagacgaggtcgcgcgagagcacgacatctcgtacaacgagcagcttgaggcgggagacaacccctacctcaagtacaaccacgcggacgccgagtttcaggagaagctcgccgacgacacatccttcgggggaaacctcggaaaggcagtctttcaggccaagaaaagggttctcgaaccttttggcctggttgaagagggtgctaagacggcccctaccggaaagcggatagacgaccactttccaaaaagaaagaaggcccggaccgaagaggactccaagccttccacctcgtcagacgccgaagctggacccagcggatcccagcagctgcaaatcccagcccaaccagcctcaagtttgggagctgatacaatgtctgcgggaggtggcggcccattgggcgacaataaccaaggtgccgatggagtgggcaatgcctcgggagattggcattgcgattccacgtggatgggggacagagtcgtcaccaagtccacccgaacctgggtgctgcccagctacaacaaccaccagtaccgagagatcaaaagcggctccgtcgacggaagcaacgccaacgcctactttggatacagcaccccctgggggtactttgactttaaccgcttccacagccactggagcccccgagactggcaaagactcatcaacaactactggggcttcagaccccggtccctcagagtcaaaatcttcaacattcaagtcaaagaggtcacggtgcaggactccaccaccaccatcgccaacaacctcacctccaccgtccaagtgtttacggacgacgactaccagctgccctacgtcgtcggcaacgggaccgagggatgcctgccggccttccctccgcaggtctttacgctgccgcagtacggttacgcgacactgaaccgcgacaacacagaaaatcccaccgagaggagcagcttcttctgcctagagtactttcccagcaagatgctgagaacgggcaacaactttgagtttacctacaactttgaggaggtgcccttccactccagcttcgctcccagtcagaacctcttcaagctggccaacccgctggtggaccagtacttgtaccgcttcgtgagcacaaataacactggcggagtccagttcaacaagaacctggccgggagatacgccaacacctacaaaaactggttcccggggcccatgggccgaacccagggctggaacctgggctccggggtcaaccgcgccagtgtcagcgccttcgccacgaccaataggatggagctcgagggcgcgagttaccaggtgcccccgcagccgaacggcatgaccaacaacctccagggcagcaacacctatgccctggagaacactatgatcttcaacagccagccggcgaacccgggcaccaccgccacgtacctcgagggcaacatgctcatcaccagcgagagcgagacgcagccggtgaaccgcgtggcgtacaacgtcggcgggcagatggccaccaacaaccagagctccaccactgcccccgcgaccggcacgtacaacctccaggaaatcgtgcccggcagcgtgtggatggagagggacgtgtacctccaaggacccatctgggccaagatcccagagacgggggcgcactttcacccctctccggccatgggcggattcggactcaaacacccaccgcccatgatgctcatcaagagcacgcctgtgcccggaaatatcaccagcttctcggacgtgcccgtcagcagcttcatcacccagtacagcaccgggcaggtcaccgtggagatggagtgggagctcaagaaggaaaactccaagaggtggaacccagagatccagtacacaaacaactacaacgacccccagtttgtggactttgccccggacagcaccggggaatacagaaccaccagacctatcggaacccgataccttacccgacccctttaa

SEQ ID NO: 815 - DNA, 2175 bp, synthetic construct
  misc_feature 1..2175: note = Description of Artificial Sequence: Synthetic polynucleotide
  source 1..2175: mol_type = other DNA
atgtcttttgttgatcaccctccagattggttggaagaagttggtgaaggtcttcgcgagtttttgggccctgaagcgggcccaccgaaaccaaaacccaatcagcagcatcaagatcaagcccgtggtcttgtgctgcctggttataactatctcggacccggaaacggtctcgatcgaggagagcctgtcaacagggcagacgaggtcgcgcgagagcacgacatctcgtacaacgagcagcttgaggcgggagacaacccctacctcaagtacaaccacgcggacgccgagtttcaggagaagctcgccgacgacacatccttcgggggaaacctcggaaaggcagtctttcaggccaagaaaagggttctcgaaccttttggcctggttgaagagggtgctaagacggcccctaccggaaagcggatagacgaccactttccaaaaagaaagaaggtccggaccgaagaggactccaagccttccacctcgtcagacgccgaagctggacccagcggatcccagcagctgcaaatcccagcccaaccagcctcaagtttgggagctgatacaatgtctgcgggaggtggcggcccattgggcgacaataaccaaggtgccgatggagtgggcaatgcctcgggagattggcattgcgattccacgtggatgggggacagagtcgtcaccaagtccacccgaacctgggtgccgcccagctacaacaaccaccagtaccgagagatcaaaagcggctccgtcgacggaagcaacgccaacgcctactttggatacagcaccccctgggggtactttgactttaaccgcttccacagccactggagcccccgagactggcaaagactcatcaacaactactggggcttcagaccccggtccctcagagtcaaaatcttcaacattcaagtcaaagaggtcacggtgcaggactccaccaccaccatcgccaacaacctcacctccaccgtccaagtgtttacggacgacgactaccagctgccctacgtcgtcggcaacgggaccgagggatgcctgccggccttccctccgcaggtctttacgctgccgcagtacggttacgcgacgctgaaccgcgacaacacagaaaatcccaccgagaggagcagcttcttctgcctagagtactttcccagcaagatgctgagaacgggcaacaactttgagtttacctacaactttgaggaggtgcccttccactccagcttcgctcccagtcagaacctcttcaagctggccaacccgctggtggaccagtacttgtaccgcttcgtgagcacaaataacactggcggagtccagttcaacaagaacctggccgggagatacgccaacacctacaaaaactggttcccggggcccatgggccgaacccagggctggaacctgggctccggggtcaaccgcgccagtgtcagcgccttcgccacgaccaataggatggagctcgagggcgcgagttaccaggtgcccccgcagccgaacggcatgaccaacaacctccagggcagcaacacctatgccctggagaacactatgatcttcaacagccagccggcgaacccgggcaccaccgccacgtacctcgagggcaacatgctcatcaccagcgagagcgagacgcagccggtgaaccgcgtggcgtgcaacgtcggcgggcagatggccaccaacaaccagagctccaccactgcccccgcgaccggcacgtacaacctccaggaaatcgtgcccggcagcgtgtggatggagagggacgtgtacctccaaggacccatctgggccaagatcccagagacgggggcgcactttcacccctctccggccatgggcggattcggactcaaacacccaccgcccatgatgctcatcaagaacacgcctgtgcccggaaatatcaccagcttctcggacgtgcccgtcagcagcttcatcacccagtacagcaccgggcaggtcaccgtggagatggagtgggagctcaagaaggaaaactccaagaggtggaacccagagatccagtacacaaacaactacaacgacccccagtttgtggactttgccccggacagcaccggggaatacagaaccaccagacctattggaacccgataccttacccgacccctttaa

SEQ ID NO: 816 - DNA, 2175 bp, synthetic construct
  misc_feature 1..2175: note = Description of Artificial Sequence: Synthetic polynucleotide
  source 1..2175: mol_type = other DNA
atgtcttttgttgatcaccctccagattggttggaagaagttggtgaaggtcttcgcgagtttttgggccttgaagcgggcccaccgaaaccaaaacccaatcagcagcatcaagatcaagcccgtggtcttgtgctgcctggttataactatctcggacccggaaacggtctcgatcgaggagagcctgtcaacagggcagacgaggtcgcgcgagagcacgacatctcgtacaacgagcagcttgaggcgggagacaacccctacctcaagtacaaccacgcggacgccgagtttcaggagaagctcgccgacgacacatccttcgggggaaacctcggaaaggcagtctttcaggccaagaaaagggttctcgaaccttttggcctggttgaagagggtgctaagacggcccctaccggaaagcggatagacgaccactttccaaaaagaaagaaggcccggaccgaagaggactccaagccttccacctcgtcagacgccgaagctggacccagcggatcccagcagctgcaaatcccagcccaaccagcctcaagtttgggagctgatacaatgtctgcgggaggtggcggcccattgggcgacaataaccaaggtgccgatggagtgggcaatgcctcgggagattggcattgcgattccacgtggatgggggacagagtcgtcaccaagtccacccgaacctgggtgctgcccagctacaacaaccaccagtaccgagagatcaaaagcggctccgtcgacggaagcaacgccaacgcctactttggatacagcaccccctgggggtactttgactttaaccgcttccacagccactggagcccccgagactggcaaagactcatcaacaactactggggcttcagaccccggtccctcagagtcaaaatcttcaacattcaagtcaaagaggtcacggtgcaggactccaccaccaccatcgccaacaacctcacctccaccgtccaagtgtttacggacgacgactaccagctgccctacgtcgtcggcaacgggaccgagggatgcctgccggccttccctccgcaggtctttacgctgccgcagtacggttacgcgacgctgaaccgcgacaacaccgaaaatcccaccgagaggagcagcttcttctgcctagagtactttcccagcaagatgctgagaacgggcaacaactttgagtttacctacaactttgaggaggtgcccttccactccagcttcgctcccagtcagaacctcttcaagctggccaacccgctggtggaccagtacttgtaccgcttcgtgagcacaaataacactggcggagtccagttcaacaagaacctggccgggagatacgccaacacctacaaaaactggttcccggggcccatgggccgaacccagggctggaacctgggctccggggtcaaccgcgccagtgtcagcgccttcgccacgaccaataggatggagctcgagggcgcgagttaccaggtgcccccgcagccgaacggcatgaccaacaacctccagggcagcaacacctatgccctggagaacactatgatcttcaacagccagccggcgaacccgggcaccaccgccacgtacctcgagggcaacatgctcatcaccagcgagagcgagacgcagccggtgaaccgcgtggcgtacaacgtcggcgggcagatggccaccaacaaccagagctccaccactgcccccgcgaccggcgcgtacaacctccaggaaatcgtgcccggcagcgtgtggatggagagggacgtgtacctccaaggacccatctgggccaagatcccagagacgggggcgcactttcacccctctccggccatgggcggattcggactcaaacacccaccgcccatgatgctcatcaagaacacgcctgtgcccggaaatatcaccagcttctcggacgtgcccgtcagcagcttcatcacccagtacagcaccgggcaggtcaccgtggagatggagtgggagctcaagaaggaaaactccaagaggtggaacccagagatccagtacacaaacaactacaacgacccccagtttgtggactttgccccggacagcaccggggaatacagaaccaccagacctatcggaacccgataccttacccgacccctttaa

SEQ ID NO: 817 - DNA, 2175 bp, synthetic construct
  misc_feature 1..2175: note = Description of Artificial Sequence: Synthetic polynucleotide
  source 1..2175: mol_type = other DNA
atgtcttttgttgatcaccctccagattggttggaagaagttggtgaaggtcttcgcgagtttttgggccttgaagcgggcccaccgaaaccaaaacccaatcagcagcatcaagatcaagcccgtggtcttgtgctgcctggttataactatctcggacccggaaacggtctcgatcgaggagagcctgtcaacagggcagacggggtcgcgcgagagcacgacatctcgtacaacgagcagcttgaggcgggagacaacccctacctcaagtacaaccacgcggacgccgagtttcaggagaagctcgccgacgacacatccttcgggggaaacctcggaaaggcagtctttcaggccaagaaaagggttctcgaaccttttggcctggttgaagagggtgctaagacggcccctaccggaaagcggatagacgaccactttccaaaaagaaagaaggcccggaccgaagaggactccaagccttccacctcgtcagacgccgaagctggacccagcggatcccagcagctgcaaatcccagcccaaccagcctcaagtttgggagctgatacaatgtctgcgggaggtggcggcccattgggcgacaataaccaaggtgccgatggagtgggcaatgcctcgggagattggcattgcgattccacgtggatgggggacagagtcgtcaccaagtccacccgaacctgggtgctgcccagctacaacaaccaccagtaccgagagatcaaaagcggctccgtcgacggaagcaacgccaacgcctactttggatacagcaccccctgggggtactttgactttaaccgcttccacagccactggagcccccgagactggcaaagactcatcaacaactactggggcttcagaccccggtccctcagagtcaaaatcttcaacattcaagtcaaagaggtcacggtgcaggactccaccaccaccatcgccaacaacctcacctccaccgtccaagcgtttacggacgacgactaccagctgccctacgtcgtcggcaacgggaccgagggatgcctgccggccttccctccgcaggtctttacgctgccgcagtacggttacgcgacgctgaaccgcgacaacacagaaaatcccaccgagaggagcagcttcttctgcctagagtactttcccagcaagatgctgagaacgggcaacaactttgagtttacctacaactttgaggaggtgcccttccactccagcttcgctcccagtcagaacctcttcaagctggccaacccgctggtggaccagtacttgtaccgcttcgtgagcacaaataacactggcggagtccagttcaacaagaacctggccgggagatacgccaacacctacaaaaactggttcccggggcccatgggccgaacccagggctggaacctgggctccggggtcaaccgcgccagtgtcagcgccttcgccacgaccaataggatggagctcgagggcgcgagttaccaggtgcccccgcagccgaacggcatgaccaacaacctccagggcagcaacacctatgccctggagaacactatgatcttcaacagccagccggcgaacccgggcaccaccgccacgtacctcgagggcaacatgctcatcaccagcgagagcgagacgcagccggtgaaccgcgtggcgtacaacgtcggcgggcagatggccaccaacaaccagagctccaccactgcccccgcgaccggcacgtacaacctccaggaaatcgtgcccggcagcgtgtggatggagagggacgtgtacctccaaggacccatctgggccaagatcccagagacgggggcgcactttcacccctctccggccatgggcggattcggactcaaacacccaccgcccatgatgctcatcaagaacacgcctgtgcccggaaatatcaccagcttctcggacgtgcccgtcagcagcttcatcacccagtacagcaccgggcaggtcaccgtggagatggagtgggagctcaagaaggaaaactccaagaggtggaacccagagatccagtacacaaacaactacaacgacccccagtttgtggactttgccccggacagcaccggggaatacagaaccaccagacctatcggaacccgataccttacccgacccctttaa

SEQ ID NO: 818 - DNA, 2175 bp, synthetic construct
  misc_feature 1..2175: note = Description of Artificial Sequence: Synthetic polynucleotide
  source 1..2175: mol_type = other DNA
atgtcttttgttgatcaccctccagattggttggaagaagttggtgaaggtcttcgcgagtttttgggccttgaagcgggcccaccgaaaccaaaacccaatcagcagcatcaagatcaagcccgtggtcttgtgctgcctggttataactatctcggacccggaaacggtctcgatcgaggagagcctgtcaacagggcagacgaggtcgcgcgagagcacgacatctcgtacaacgagcagcttgaggcgggagacaacccctacctcaagtacaaccacgcggacgccgagtttcaggagaagctcgccgacgacacatccttcgggggaaacctcggaaaggcagtctttcaggccaagaaaagggttctcgaaccttttggcctggttgaagagggtgctaagacggcccctaccggaaagcggatagacgaccactttccaaaaagaaagaaggcccggaccgaagaggactccaagccttccacctcgtcagacgccgaagctggacccagcggatcccagcagctgcaaatcccagcccaaccagcctcaagtttgggagctgatacaatgtctgcgggaggtggcggcccattgggcgacaataaccaaggtgccgatggagtgggcaatgcctcgggagattggcattgcgattccacgtggatgggggacagagtcgtcaccaagtccacccgaacctgggtgctgcccagctacaacaaccaccagtaccgagagatcaaaagcggctccgtcgacggaagcaacgccaacgcctactttggatacagcaccccctgggggtactttgactttaaccgcttccacagccactggagcccccgagactggcaaagactcatcaacaactactggggcttcagaccccggtccctcagagtcaaaatcttcaacattcaagtcaaagaggtcacggtgcaggactccaccaccaccatcgccaacaacctcacctccaccgtccaagtgtttacggacgacgactaccagctgccctacgtcgtcggcaacgggaccgagggatgcctgccggccttccctccgcaggtctttacgctgccgcagtacggttacgcgacgctgaaccgcgacaacacagaaaatcccaccgagaggagcagcttcttctgcctagagtactttcccagcaagatgctgagaacgggcaacaactttgagtttacctacaactttgaggaggtgcccttccactccagcttcgctcccagtcagaacctcttcaagctggccaacccgctggtggaccagtacttgtaccgcttcgtgagcacaaataacactggcggagtccagttcaacaagaacctggccgggagatacgccaacacctacaaaaactggttcccggggcccatgggccgaacccagggctggaacctgggctccggggtcaaccgcgccagtgtcagcgccttcgccacgaccaataggatggagctcgagggcgcgagttactaggtgcccccgcagccgaacggcatgaccaacaacctccagggcagcaacacctatgccctggagaacactatgatcttcaacagccagccggcgaacccgggcaccaccgccacgtacctcgagggcaacatgctcatcaccagcgagagcgagacgcagccggtgaaccgcgtggcgtacaacgtcggcgggcagatggccaccaacaaccagagctccaccactgcccccgcgaccggcacgtacaacctccaggaaatcgtgcccggcagcgtgtggatggagggggacgtgtacctccaaggacccatctgggccaagatcccagagacgggggcgcactttcacccctctccggccatgggcggattcggactcaagcacccaccgcccatgatgctcatcaagaacacgcctgtgcccggaaatatcaccagcttctcggacgtgcccgtcagcagcttcatcacccagtacagcaccgggcaggtcaccgtggagatggagtgggagctcaagaaggaaaactccaagaggtggaacccagagatccagtacacaaacaactacaacgacccccagtttgtggactttgccccggacagcaccggggaatacagaaccaccagacctatcggaacccgataccttacccgacccctttaa

SEQ ID NO: 819 - DNA, 2175 bp, synthetic construct
  misc_feature 1..2175: note = Description of Artificial Sequence: Synthetic polynucleotide
  source 1..2175: mol_type = other DNA
atgtcttttgttgatcaccctccagattggttggaagaagttggtgaaggtcttcgcgagtttttgggccttgaagcgggcccaccgaaaccaaaacccaatcagcagcatcaagatcaagcccgtggtcttgtgctgcctggttataactatctcggacccggaaacggtctcgatcgaggagagcctgtcaacagggcagacgaggtcgcgcgagagcacgacatctcgtacaacgagcagcttgaggcgggagacaacccctacctcaagtacaaccacgcggacgccgagtttcaggagaagctcgccgacgacacatccttcgggggaaacctcggaaaggcagtctttcaggccaagaaaagggttctcgaaccttttggcctggttgaagagggtgctaagacggcccctaccggaaagcggatagacgaccactttccaaaaagaaagaaggtccggaccgaagaggactccaagccttccacctcgtcagacgccgaagctggacccagcggatcccagcagctgcaaatcccagcccaaccagcctcaagtttgggagctgatacaatgtctgcgggaggtggcggcccattgggcgacaataaccaaggtgccgatggagtgggcaatgcctcgggagattggcattgcgattccacgtggatgggggacagagtcgtcaccaagtccacccgaacctgggtgctgcccagctacaacaaccaccagtaccgagagatcaaaagcggctccgtcgacggaagcaacgccaacgcctactttggatacagcaccccctgggggtactttgactttaaccgcttccacagccactggagcccccgagactggcaaagactcatcaacaactactggggcttcagaccccggtccctcagagtcaaaatcttcaacattcaagtcaaagaggtcacggtgcaggactccaccaccaccatcgccaacaacctcacctccaccgtccaagtgtttacggacgacgactaccagctgccctacgtcgtcggcaacgggaccgagggatgcctgccggccttccctccgcaggtctttacgctgccgcagtacggttacgcgacgctgaaccgcgacaacacagaaaatcccaccgagaggagcagcttcttctgcctagagtactttcccagcaagatgctgagaacgggcaacaactttgagtttacctacaactttgaggaggtgcccttccactccagcttcgctcccagtcagaacctcttcaagctggccaacccgctggtggaccagtacttgtaccgcttcgtgagcacaaataacactggcggagtccagttcaacaagaacctggccgggagatacgccaacacctacaaaaactggttcccggggcccatgggccgaacccagggctggaacctgggctccggggtcaaccgcgccagtgtcagcgccttcgccacgaccaataggatggagctcgagggcgcgagttaccaggtgcccccgcagccgaacggcatgaccaacaacctccagggcagcaacacctatgccctggagaacactatgatcttcaacagccagccggcgaacccgggcaccaccgccacgtacctcgagggcaacatgctcatcaccagcgagagcgagacgcagccggtgaaccgcgtggcgtacaacgtcggcgggcagatggccaccaacaaccagagctccaccactgcccccgcgaccggcacgtacaacctccaggaaatcgtgcccggcagcgtgtggatggagagggacgtgtacctccaaggacccatctgggccaagatcccagagacgggggcgcactttcacccctctccggccatgggcggattcggactcaaacacccaccgcccatgatgctcatcaagaacacgcctgtgcccggaaatatcaccagcttctcggacgtgcccgtcagcagcttcatcacccagtacagcaccgggcaggtcaccgtggagatggagtgggagctcaagaaggaaaactccgagaggtggaacccagagatccagtacacaaacaactacaacgacccccagtttgtggactttgccccggacagcaccggggaatacagaaccaccagacctattggaacccgataccttacccgacccctttaa

SEQ ID NO: 820 - DNA, 2175 bp, synthetic construct
  misc_feature 1..2175: note = Description of Artificial Sequence: Synthetic polynucleotide
  source 1..2175: mol_type = other DNA
atgtcttttgttgatcaccctccagattggttggaagaagttggtgaaggtcttcgcgagtttttgggccttgaagcgggcccaccgaaaccaaaacccaatcagcagcatcaagatcaagcccgtggtcttgtgctgcctggttataactatctcggacccggaaacggtctcgatcgaggagagcctgtcaacagggcagacgaggtcgcgcgagagcacgacatctcgtacagcgagcagcttgaggcgggagacaacccctacctcaagtacaaccacgcggacgccgagtttcaggagaagctcgccgacgacacatccttcgggggaaacctcggaaaggcagtctttcaggccaagaaaagggttctcgaaccttttggcctggttgaagagggtgctaagacggcccctaccggaaagcggatagacgaccactttccaaaaagaaagaaggcccggaccgaagaggactccaagccttccacctcgtcagacgccgaagctggacccagcggatcccagcagctgcaaatcccagcccaaccagcctcaagtttgggagctgatacaatgtctgcgggaggtggcggcccattgggcgacaataaccaaggtgccgatggagtgggcaatgcctcgggagattggcattgcgattccacgtggatgggggacagagtcgtcaccaagtccacccgaacctgggtgctgcccagctacaacaaccaccagtaccgagagatcaaaagcggctccgtcgacggaagcaacgccaacgcctactttggatacagcaccccctgggggtactttgactttaaccgcttccacagccactggagcccccgagactggcaaagactcatcaacaactactggggcttcagaccccggtccctcagagtcaaaatcttcaacattcaagtcaaagaggtcacggtgcaggactccaccaccaccatcgccaacaacctcacctccaccgtccaagtgtttacggacgacgactaccagctgccctacgtcgtcggcaacgggaccgagggatgcctgccggccttccctccgcaggtctttacgctgccgcagtacggttacgcgacgctgaaccgcgacaacacagaaaatcccaccgagaggagcagcttcttctgcctagagtactttcccagcaagatgctgagaacgggcaacaactttgagtttacctacaactttgaggaggtgcccttccactccagcttcgctcccagtcagaacctcttcaagctggccaacccgctggtggaccagtacttgtaccgcttcgtgagcacaaataacactggcggagtccagttcaacaagaacctggccgggagatacgccaacacctacaaaaactggttcccggggcccatgggccgaacccagggctggaacctgggctccggggtcaaccgcgccagtgtcagcgccttcgccacgaccaataggatggagctcgagggcgcgagttaccaggtgcccccgcagccgaacggcatgaccaacaacctccagggcagcaacacctatgccctggagaacactatgatcttcaacagccagccggcgaacccgggcaccaccgccacgtacctcgagggcaacatgctcatcaccagcgagagcgagacgcagccggtgaaccgcgtggcgtacaacgtcggcgggcagatggccaccaacaaccagagctccaccactgcccccgcgaccggcacgtacaacctccaggaaatcgtgcccggcagcgtgtggatggagagggacgtgtacctccaaggacccatctgggccaagatcccagagacgggggcgcactttcacccctctccggccatgggcggattcggactcaaacacccaccgcccatgatgctcatcaagaacacgcctgtgcccggaaatatcaccagcttctcggacgtgcccgtcagcagcttcatcacccagtacagcaccgggcaggtcaccgtggagatggagtgggagctcaagaaggaaaactccaagaggtggaacccagagatccagtacacaaacaactacaacgacccccagtttgtggactttgccccggacagcaccggggaatacagaaccgccagacctatcggaacccgataccttacccgacccctttaa

SEQ ID NO: 821 - DNA, 2175 bp, synthetic construct
  misc_feature 1..2175: note = Description of Artificial Sequence: Synthetic polynucleotide
  source 1..2175: mol_type = other DNA
atgtcttttgttgatcaccctccagattggttggaagaagttggtgaaggtcttcgcgagtttttgggccctgaagcgggcccaccgaaaccaaaacccaatcagcagcatcaagatcaagcccgtggtcttgtgctgcctggttataactatctcggacccggaaacggtctcgatcgaggagagcctgtcaacagggcagacgaggtcgcgcgagagcacgacatctcgtacaacgagcagcttgaggcgggagacaacccctacctcaagtacaaccacgcggacgccgagtttcaggagaagctcgccgacgacacatccttcgggggaaacctcggaaaggcagtctttcaggccaagaaaagggttctcgaaccttttggcctggttgaagagggtgctaagacggcccctaccggaaagcggatagacgaccactttccaaaaagaaagaaggcccggaccgaagaggactccaagccttccacctcgtcagacgccgaagctggacccagcggatcccagcagctgcaaatcccagcccaaccagcctcaagtttgggagctgatacaatgtctgcgggaggtggcggcccattgggcgacaataaccaaggtgccgatggagtgggcaatgcctcgggagattggcattgcgattccacgtggatgggggacagagtcgtcaccaagtccacccgaacctgggtgctgcccagctacaacaaccaccagtaccgagagatcaaaagcggctccgtcgacggaagcaacgccaacgcctactttggatacagcaccccctgggggtactttgactttaaccgcttccacagccactggagcccccgagactggcaaagactcatcaacaactactggggcttcagaccccggtccctcagagtcaaaatcttcaacattcaagtcaaagaggtcacggtgcaggactccaccaccaccatcgccaacaacctcacctccaccgtccaagtgtttacggacgacgactaccagctgccctacgtcgtcggcaacgggaccgagggatgcctgccggccttccctccgcaggtctttacgctgccgcagtacggttacgcgacgctgaaccgcgacaacacagaaaatcccaccgagaggagcagcttcttctgcctagagtactttcccagcaagatgctgagaacgggcaacaactttgagtttacctacaactttgaggaggtgcccttccactccagcttcgctcccagtcagaacctcttcaagctggccaacccgctggtggaccagtacttgtaccgcttcgtgagcacaaataacactggcggagtccagttcaacaagaacctggccgggagatacgccaacacctacaaaaactggttcccggggcccatgggccgaacccagggctggaacctgggctccggggtcaaccgcgccagtgtcagcgccttcgccacgaccaataggatggagctcgagggcgcgagttaccaggtgcccccgcagccgaacggcatgaccaacaacctccagggcagcaacacctatgccctggagaacactatgatcttcaacagccagccggcgaacccgggcaccaccgccacgtacctcgagggcaacatgctcatcaccagcgagagcgagacgcagccggtgaaccgcgtggcgtacaacgtcggcgggcagatgaccaccaacaaccagagctccaccactgcccccgcgaccggcacgtacaacctccaggaaatcgtgcccggcagcgtgtggatggagagggacgtgtacccccaaggacccatctgggccaagatcccagagacgggggcgcactttcacccctctccggccatgggcggattcggactcaaacacccaccgcccatgatgctcatcaagaacacgcctgtgcccggaaatatcaccagcttctcggacgtgcccgtcagcagcttcatcacccagtacagcaccgggcaggtcaccgtggagatggagtgggagctcaagaaggaaaactccaagaggtggaacccagagatccagtacacaaacaactacaacgacccccagtttgtggactttgccccggacagcaccggggaatacaggaccaccagacctatcggaacccgataccttacccgacccctttaa

SEQ ID NO: 822 - DNA, 2175 bp, synthetic construct
  misc_feature 1..2175: note = Description of Artificial Sequence: Synthetic polynucleotide
  source 1..2175: mol_type = other DNA
atgtcttttgttgatcaccctccagattggttggaagaagttggtgaaggtcttcgcgagtttttgggccttgaagcgggcccaccgaaaccaaaacccaatcagcagcatcaagatcaagcccgtggtcttgtgctgcctggttataactatctcggacccggaaacggtctcgatcgaggagagcctgtcaacagggcagacgaggtcgcgcgagagcacgacatctcgtacaacgagcagcttgaggcgggagacaacccctacctcaagtacaaccacgcggacgccgagtttcaggagaagctcgccgacgacacatccttcgggggaaacctcggaaaggcagtctttcaggccaagaaaagggttctcgaaccttttggcctggttgaagagggtgctaagacggcccctaccggaaagcggatagacgaccactttccaaaaagaaagaaggcccggaccgaagaggactccaagccttccacctcgtcagacgccgaagctggacccagcggatcccagcagctgcaaatcccagcccaaccagcctcaagtttgggagctgatacaatgtctgcgggaggtggcggcccattgggcgacaataaccaaggtgccgatggagtgggcaatgcctcgggagattggcattgcgattccacgtggatgggggacagagtcgtcaccaagtccacccgaacctgggtgctgcccagctacaacaaccaccagtaccgagagatcaaaagcggctccgtcgacggaagcaacgccaacgcctactttggatacagcaccccctgggggtactttgactttaaccgcttccacagccactggagcccccgagactggcaaagactcatcaacaactactggggcttcagaccccggtccctcagagtcaaaatcttcaacattcaagtcaaagaggtcacggtgcaggactccaccaccaccatcgccaacaacctcacctccaccgtccaagtgtttacggacgacgactaccagctgccctacgtcgtcggcaacgggaccgagggatgcctgccggccttccctccgcaggtctttacgctgccgcagtacggttacgcgacgctgaaccgcgacaacacagaaaatcccaccgagaggagcagcttcctctgcctagagtactttcccagcaagatgctgagaacgggcaacaactttgagtttacctacaactttgaggaggtgcccttccactccagcttcgctcccagtcagaacctcttcaagctggccaacccgctggtggaccagtacttgtaccgcttcgtgagcacaaataacactggcggagtccagttcaacaagaacctggccgggagatacgccaacacctacaaaaactggttcccggggcccatgggccgaacccagggctggaacctgggctccggggtcaaccgcgccagtgtcagcgccttcgccacgaccaataggatggagctcgagggcgcgagttaccaggtgcccccgcagccgaacggcatgaccaacaacctccagggcagcaacacctatgccctggagaacactatgatcttcaacagccagccggcgaacccgggcaccaccgccacgtacctcgagggcaacatgctcatcaccagcgagagcgagacgcagccggtgaaccgcgtggcgtacaacgtcggcgggcagatggccaccaacaaccagagctccaccactgcccccgcgaccggcacgtacaacctccaggaaatcgtgcccggcagcgtgtggatgaagagggacgtgtacctccaaggacccatctgggccaagatcccagagacgggggcgcactttcacccctctccggccatgggcggattcggactcaaacacccaccgcccatgatgctcatcaagaacacgcctgtgcccggaaatatcaccagcttctcggacgtgcccgtcagcagcttcatcacccagtacagcaccgggcaggtcaccgtggagatggagtgggagctcaagaaggaaaactccaagaggtggaacccagagatccagtacacaaacaactacaacgacccccagtttgtggactttgccccggacagcaccggggaatacagaaccaccagacctatcggaacccgataccttacccgacccctttaa

SEQ ID NO: 823 - DNA, 2175 bp, synthetic construct
  misc_feature 1..2175: note = Description of Artificial Sequence: Synthetic polynucleotide
  source 1..2175: mol_type = other DNA
atgtcttttgttgatcaccctccagattggttggaagaagttggtgaaggtcttcgcgagtttttgggccttgaggcgggcccaccgaaaccaaaacccaatcagcagcatcaagatcaagcccgtggtcttgtgctgcctggttataactatctcggacccggaaacggtctcgatcgaggagagcctgtcaacagggcagacgaggtcgcgcgagagcacgacatctcgtacaacgagcagcttgaggcgggagacaacccctacctcaagtacaaccacgcggacgccgagtttcaggagaagctcgccgacgacacatccttcgggggaaacctcggaaaggcagtctttcaggccaagaaaagggttctcgaaccttttggcctggttgaagagggtgctaagacggcccctaccggaaagcggatagacgaccactttccaaaaagaaagaaggcccggaccgaagaggactccaagccttccaccccgtcagacgccgaagctggacccagcggatcccagcagctgcaaatcccagcccaaccagcctcaagtttgggagctgatacaatgtctgcgggaggtggcggcccattgggcgacaataaccaaggtgccgatggagtgggcaatgcctcgggagattggcattgcgattccacgtggatgggggacagagtcgtcaccaagtccacccgaacctgggtgctgcccagctacaacaaccaccagtaccgagagatcaaaagcggctccgtcgacggaagcaacgccaacgcctactttggatacagcaccccctgggggtactttgactttaaccgcttccacagccactggagcccccgagactggcaaagactcatcaacaactactggggcttcagaccccggtccctcagagtcaaaatcttcaacattcaagtcaaagaggtcacggtgcaggactccaccaccaccatcgccaacaacctcacctccaccgtccaagtgtttacggacgacgactaccagctgccctacgtcgtcggcaacgggaccgagggatgcctgccggccttccctccgcaggtctttacgctgccgcagtacggttacgcgacgctgaaccgcgacaacacagaaaatcccaccgagaggagcagcttcttctgcctagagtactttcccagcaagatgctgagaacgggcaacaactttgagtttacctacaactttgaggaggtgcccttccactccagcttcgctcccagtcagaacctcttcaagctggccaacccgctggtggaccagtacttgtaccgcttcgtgagcacaaataacactggcggagtccagttcaacaagaacctggccgggagatacgccaacacctacaaaaactggttcccggggcccatgggccgaacccagggctggaacctgggctccggggtcaaccgcgccagtgtcagcgccttcgccacgaccaataggatggagctcgagggcgcgagttaccaggtgcccccgcagccgaacggcatgaccaacaacctccagggcagcaacacctatgccctggagaacactatgatcttcaacagccagccggcgaacccgggcaccaccgccacgtacctcgagggcaacatgctcatcaccagcgagagcgagacgcagccggtgaaccgcgtggcgtacaacgtcggcgggcagatggccaccaacaaccagagctccaccactgcccccgcgaccggcacgtacaacctccaggaaatcgtgcccggcagcgtgtggatggagagggacgtgtacctccaaggacccatctgggccaagatcccagagacgggggcgcactttcacccctctccggccatgggcggattcggactcaaacacccaccgcccatgatgctcatcaagaacacgcctgtgcccggaaatatcaccagcttctcggacgtgcccgtcagcagcttcatcacccagtacagcaccgggcaggtcaccgtggagatggagtgggagctcaagaaggaaaactccaagaggtggaacccagagatccagtacacaaacaactacaacgacccccagtttgtggactttgccccggacagcaccggggaatacagaaccaccagacctatcggaacccgataccttacccgacccctttaa

SEQ ID NO: 824 - DNA, 2175 bp, synthetic construct
  misc_feature 1..2175: note = Description of Artificial Sequence: Synthetic polynucleotide
  source 1..2175: mol_type = other DNA
atgtcttttgttgatcaccctccagattggttggaagaagttggtgaaggtcttcgcgagtttttgggccttgaagcgggcccaccgaaaccaaaacccaatcagcagcatcaagatcaagcccgtggtcttgtgctgcctggttataactatctcggacccggaaacggtctcgatcgaggagagcctgtcaacagggcagacgaggtcgcgcgagagcacgacatctcgtacaacgagcagcttgaggcgggagacaacccctacctcaagtacaaccacgcggacgccgagtttcaggagaagctcgccgacgacacatccttcgggggaaacctcggaaaggcagtctttcaggccaagaaaagggttctcgaaccttttggcctggttgaagagggtgctaagacggcccctaccggaaagcggatagacgaccactttccaaaaagaaagaaggcccggaccgaagaggactccaagccttccacctcgtcagacgccgaagctggacccagcggatcccagcagctgcaaatcccagcccaaccagcctcaagtttgggagctgatacaatgtctgcgggaggtggcggcccattgggcgacaataaccaaggtgccgatggagtgggcaatgcctcgggagattggcattgcgattccacgtggatgggggacagagtcgtcaccaagtccacccgaacctgggtgctgcccagctacaacaaccaccagtaccgagagatcaaaagcggctccgtcgacggaagcaacgccaacgcctactttggatacagcaccccctgggggtactttgactttaaccgcttccacagccactggagcccccgagactggcaaagactcatcaacaactactggggcttcagaccccggtccctcagagtcaaaatcttcaacattcaagtcaaagaggtcacggtgcaggactccaccaccaccatcgccaacaacctcacctccaccgtccaagtgtttacggacgacgactaccagctgccctacgtcgtcggcaacgggaccgagggatgcctgccggccttccctccgcaggtctttacgctgccgcagtacggttacgcgacgctgaaccgcgacaacacagaaaatcccaccgagaggagcagcttcttctgcctagagtactttcccagcaagatgctgagaacgggcaacaactttgagtttacctacaactttgaggaggtgcccttccactccagcttcgctcccagtcagaacctcttcaagctggccaacccgctggtggaccagtacttgtaccgcttcgtgagcacaaataacactggcggagtccagttcaacaagaacctggccgggagatacgccaacacccacaaaaactggttcccggggcccatgggccgaacccagggctggaacctgggctccggggtcaaccgcgccagtgtcagcgccttcgccacgaccaataggatggagctcgagggcgcgagttaccaggtgcccccgcagtcgaacggcatgaccaacaacctccggggcagcaacacctatgccctggagaacactatgatcttcaacagccagccggcgaacccgggcaccaccgccacgtacctcgagggcaacatgctcatcaccagcgagagcgagacgcagccggtgaaccgcgtggcgtacaacgtcggcgggcagatggccaccaacaaccagagctccaccactgcccccgcgaccggcacgtacaacctccaggaaatcgtgcccggcagcgtgtggatggagagggacgtgtacctccaaggacccatctgggccaagatcccagagacgggggcgcactttcacccctctccggccatgggcggattcggactcaaacacccaccgcccatgatgctcatcaagaacacgcctgtgcccggaaatatcaccagcttctcggacgtgcccgtcagcagcttcatcacccagtacagcaccgggcaggtcaccgtggagatggagtgggagctcaagaaggaaaactccaagaggtggaacccagagatccagtacacaaacaactacaacgacccccagtttgtggactttgccccggacagcaccggggaatacagaaccaccagacctatcggaacccgataccttacccgacccctttaa

SEQ ID NO: 825 - DNA, 2175 bp, synthetic construct
  misc_feature 1..2175: note = Description of Artificial Sequence: Synthetic polynucleotide
  source 1..2175: mol_type = other DNA
atgtcttttgttgatcaccctccagattggttggaagaagttggtgaaggtcttcgcgagtttttgggccttgaagcgggcccaccgaaaccaaaacccaatcagcagcatcaagatcaagcccgtggtcttgtgctgcctggttataactatctcggacccggaaacggtctcgatcgaggagagcctgtcaacagggcagacgaggtcgcgcgagagcacgacatctcgtacaacgagcagcttgaggcgggagacaacccctacctcaagtacaaccacgcggacgccgagtttcaggagaagctcgccgacgacacatccttcgggggaaacctcggaaaggcagtctttcaggccaagaaaagggttctcgaaccttttggcctggttgaagagggtgctaagacggcccctaccggaaagcggatagacgaccactttccaaaaagaaagaaggcccggaccgaagaggactccaagccttccacctcgtcagacgccgaagctggacccagcggatcccagcagctgcaaatcccagcccaaccagcctcaagtttgggagctgatacaatgtctgcgggaggtggcggcccattgggcgacaataaccaaggtgccgatggagtgggcaatgcctcgggagattggcattgcgattccacgtggatgggggacagagtcgtcaccaagtccacccgaacctgggtgctgcccagctacaacaaccaccagtaccgagagatcaaaagcggctccgtcgacggaagcaacgccaacgcctactttggatacagcaccccctgggggtactttgactttaaccgcttccacagccactggagcccccgagactggcaaagactcatcaacaactactggggcttcagaccccggtccctcagagtcaaaatcttcaacattcaagtcaaagaggtcacggtgcaggactccaccaccaccatcgccaacaacctcacctccaccgtccaagtgtttacggacgacgactaccagctgccctacgtcgtcggcaacgggaccgagggatgcctgccggccttccctccgcaggtctttacgctgccgcagtacggttacgcgacgctgaaccgcgacaacacagaaaatcccaccgagaggagcagcttcttctgcctagagtactttcccagcaagatgctgagaacgggcaacaactttgagtttacctacaactttgaggaggtgcccttccactccagcttcgctcccagtcagaacctcttcaagctggccaacccgctggtggaccagtacttgtaccgcttcgtgagcacaaataacactggcggagtccagttcaacaagaacctggccgggagatacgccaacacctacaaaaactggttcccggggcccatgggccgaacccagggctggaacctgggctccggggtcaaccgcgccagtgtcagcgccttcgccacgaccaataggatggagctcgagggcgcgagttaccaggtgcccccgcagccgaacggcatgaccaacaacctccagggcagcaacacctatgccctggagaacactatgatcttcaacagccagccggcgaacccgggcaccaccgccacgtacctcgagggcaacatgctcatcaccagcgagagcgagacgcagccggtgaaccgcgtggcgtacagcgtcggcgggcagatggccaccaacaaccagagctccaccactgcccccacgaccggcacgtacaacctccaggaaatcgtgcccggcagcgtgtggatggagagggacgtgtacctccaaggacccatctgggccaagatcccagagacgggggcgcactttcacccctctccggccatgggcggattcagactcaaacacccaccgcccatgatgctcatcaagaacacgcctgtgcccggaaatatcaccagcttctcggacgtgcccgtcagcagcttcatcacccagtacagcaccgggcaggtcaccgtggagatggagtgggagctcaagaaggaaaactccaagaggtggaacccagagatccagtacacaaacaactacaacgacccccagtttgtggactttgccccggacagcaccggggaatacagaaccaccagacctatcggaacccgataccttacccgacccctttaa

SEQ ID NO: 826 - DNA, 2175 bp, synthetic construct
  misc_feature 1..2175: note = Description of Artificial Sequence: Synthetic polynucleotide
  source 1..2175: mol_type = other DNA
atgtcttttgttgatcaccctccagattggttggaagaagttggtgaaggtcttcgcgagtttttgggccttgaagcgggcccaccgaaaccaaaacccaatcagcagcatcaagatcaagcccgtggtcttgtgctgcctggttataactatctcggacccggaaacggtctcgatcgaggagagcctgtcaacagggcagacgaggtcgcgcgagagcacgacatctcgtacaacgagcagcttgaggcgggagacaacccctacctcaagtacaaccacgcggacgccgagtttcaggagaagctcgccgacgacacatccttcgggggaaacctcggaaaggcagtctttcaggccaagaaaagggttctcgaaccttttggcctggttgaagagggtgctaagacggcccctaccggaaagcggatagacgaccactttccaaaaagaaagaaggcccggaccgaagaggactccaagccttccacctcgtcagacgccgaagctggacccagcggatcccagcagctgcaaatcccagcccaaccagcctcaagtttgggagctgatacaatgtctgcgggaggtggcggcccattgggcgacaataaccaaggtgccgatggagtgggcaatgcctcgggagattggcattgcgattccacgtggatgggggacagagtcgtcaccaagtccacccgaacctgggtgctgcccagctacaacaaccaccagtaccgagagatcaaaagcggctccgtcgacggaagcaacgccaacgcctactttggatacagcaccccctgggggtactttgactttaaccgcttccacagccactggagcccccgagactggcaaagactcatcaacaactactggggcttcagaccccggtccctcagagtcaaaatcttcaacattcaagtcaaagaggtcacggtgcaggactccaccaccaccatcgccaacaacctcacctccaccgtccaagtgtttacggacgacgactaccagctgccctacgtcgtcggcaacgggaccgagggatgcctgccggccttccctccgcaggtctttacgctgccgcagtacggttacgcgacgctgaaccgcgacaacacagaaaatcccaccgagaggagcagcttcttctgcctagagtactttcccagcaagatgctgagaacgggcaacaactttgagtttacctacaactttgaggaggtgcccttccactccagcttcgctcccagtcagaacctcttcaagctggccaacccgctggtggaccagtacttgtaccgcttcgtgagcacaaataacactggcggagtccagttcaacaagaacctggccgggagatacgccaacacctacaaaaactggttcccggggcccatgggccgaacccagggctggaacctgggctccggggtcaaccgcgccagtgtcagcgccttcgccgcgaccaataggatggagctcgagggcgcgagttaccaggtgcccccgcagccgaacggcatgaccaacaacctccagggcagcaacacctatgccctggagaacactatgatcttcaacagccagccggcgaacccgggcaccaccgccacgtacctcgagggcaacatgctcatcaccagcgagagcgagacgcagccggtgaaccgcgtggcgtacaacgtcggcgggcagatggccaccaacaaccagagctccaccactgcccccgcgaccggcacgtacaacctccaggaaatcgtgcccggcggcgtgtggatggagagggacgtgtacctccaaggacccatctgggccaagatcccagagacgggggcgcactttcacccctctccggccatgggcggattcggactcaaacacccaccgcccatgatgctcatcaagaacacgcctgtgcccggaaataccaccagcttctcggacgtgcccgtcagcagcttcatcacccagtacagcaccgggcaggtcaccgtggagatggagtgggagctcaagaaggaaaactccaagaggtggaacccagagatccagtacacaaacaactacaacgacccccagtttgtggactttgccccggacagcaccggggaatacagaaccaccagacctatcggaacccgataccttacccgacccctttaa

SEQ ID NO: 827 - DNA, 2175 bp, synthetic construct
  misc_feature 1..2175: note = Description of Artificial Sequence: Synthetic polynucleotide
  source 1..2175: mol_type = other DNA
atgtcttttgttgatcaccctccagattggttggaagaagttggtgaaggtcttcgcgagtttttgggccttgaagcgggcccaccgaaaccaaaacccaatcagcagcatcaagatcaagcccgtggtcttgtgctgcctggttataactatctcggacccggaaacggtctcgatcgaggagagcctgtcaacagggcagacgaggtcgcgcgagagcacgacatctcgtacaacgagcagcttgaggcgggagacaacccctacctcaagtacaaccacgcggacgccgagtttcaggagaagctcgccgacgacacatccttcgggggaaacctcggaaaggtagtctttcaggccaagaaaagggttctcgaaccttttggcctggttgaagagggtgctaagacggcccctaccggaaagcggatagacgaccactttccaaaaagaaagaaggcccggaccgaagaggactccaagccttccacctcgtcagacgccgaagctggacccagcggatcccagcagctgcaaatcccagcccaaccagcctcaagtttgggagctgatacaatgtctgcgggaggtggcggcccattgggcggcaataaccaaggtgccgatggagtgggcaatgcctcgggagattggcattgcgattccacgtggatgggggacagagtcgtcaccaagtccacccgaacctgggtgctgcccagctacaacaaccaccagtaccgagagatcaaaagcggctccgtcgacggaagcaacgccaacgcctactttggatacagcaccccctgggggtactttgactttaaccgcttccacagccactggggcccccgagactggcaaagactcatcaacaactactggggcttcagaccccggtccctcagagtcaaaatcttcaacattcaagtcaaagaggtcacggtgcaggactccaccaccaccatcgccaacaacctcacctccaccgtccaagtgtttacggacgacgactaccagctgccctacgtcgtcggcaacgggaccgagggatgcctgccggccttccctccgcaggtctttacgctgccgcagtacggttacgcgacgctgaaccgcgacaacacagaaaatcccaccgagaggagcagcttcttctgcctagagtactttcccagcaagatgctgagaacgggcaacaactttgagtttacctacaactttgaggaggtgcccttccactccagcttcgctcccagtcagaacctcttcaagctggccaacccgctggtggaccagtacttgtaccgcttcgtgagcacaaataacactggcggagtccagttcaacaagaacctggccgggagatacgccaacacctacaaaaactggttcccggggcccatgggccgaacccagggctggaacctgggctccggggtcaaccgcgccagtgtcagcgccctcgccacgaccaataggatggagctcgagggcgcgagttaccaggtgcccccgcagccgaacggcatgaccaacaacctccagggcagcaacacctatgccctggagaacactatgatcttcaacagccagccggcgaacccgggcaccaccgccacgtacctcgagggcaacatgctcatcaccagcgagagcgagacgcagccggtgaaccgcgtggcgtacaacgtcggcgggcagatggccaccaacaaccagagctccaccactgcccccgcgaccggcacgtacaacctccaggaaatcgtgcccggcagcgtgtggatggagagggacgtgtacctccaaggacccatctgggccaagatcccagagacgggggcgcactttcacccctctccggccatgggcggattcggactcaaacacccaccgcccatgatgctcatcaagaacacgcctgtgcccggaaatatcaccagcttctcggacgtgcccgtcagcagcttcatcacccagtacagcaccgggcaggtcaccgtggagatggagtgggagctcaagaaggaaaactccaagaggtggaacccagagatccagtacacaaacaactacaacgacccccagtttgtggactttgccccggacagcaccggggaatacagaaccaccagacctatcggaacccgataccttacccgacccctttaa

SEQ ID NO: 828 - DNA, 2175 bp, synthetic construct
  misc_feature 1..2175: note = Description of Artificial Sequence: Synthetic polynucleotide
  source 1..2175: mol_type = other DNA
atgtcttttgttgatcaccctccagattggttggaagaagttggtgaaggtcttcgcgagtttttgggccttgaagcgggcccaccgaaaccaaaacccaatcagcagcatcaagatcaagcccgtggtcttgtgctgcctggttataactatctcggacccggaaacggtctcgatcgaggagagcctgtcaacagggcagacgaggtcgcgcgagagcacgacatctcgtacaacgagcagcttgaggcgggagacaacccctacctcaagtacaaccacgcggacgccgagtttcaggagaagctcgccgacgacacatccttcgggggaaacctcggaaaggcagtctttcaggccaagaaaagggttctcgaaccttttggcctggttgaagagggtgctaagacggcccctaccggaaagcggatagacgaccactttccaaaaagaaagaaggcccggaccgaagaggactccaagccttccacctcgtcagacgccgaagctggacccagcggatcccagcagctgcaaatcccagcccaaccagcctcaagtttgggagctgatacaatgtctgcgggaggtggcggcccattgggcgacaataaccaaggtgccgatggagtgggcaatgcctcgggagattggcattgcgattccacgtggatgggggacagagtcgtcaccaagtccacccgaacctgggtgctgcccagctacaacaaccaccagtaccgagagatcaaaagcggctccgtcgacggaagcaacgccaacgcctactttggatacagcaccccctgggggtactttgactttaaccgcttccacagccactggagcccccgagactggcaaagactcatcaacaactactggggcttcagaccccggtccctcagagtcaaaatcttcaacattcaagtcaaagaggtcacggtgcaggactccaccaccaccatcgccaacaacctcacctccaccgtccaagtgtttacggacgacgactaccagctgccctacgtcgtcggcaacgggaccgagggatgcctgccggccttccctccgcaggtctttacgctgccgcagtacggttacgcgacgctgaaccgcgacaacacagaaaatcccaccgagaggagcagcttcttctgcctagagtactttcccagcaagatgctgagaacgggcaacaactttgagtttacctacaactttgaggaggtgcccttccactccagcttcgctcccagtcagaacctcttcaagctggccaacccgctggtggaccagtacttgtaccgcttcgtgagcacaaataacactggcggagtccagttcaacaagaacctggccgggagatacgccaacacctacaaaaactggttcccggggcccatgggccgaacccagggctggaacctgggctccggggtcaaccgcgccagtgtcagcgccttcgccacgaccaataggatggagctcgagggcgcgagttaccaggtgcccccgcagccgaacggcatgaccaacaacctccagggcagcaacacctatgccctggagaacactatgatcttcaacagccagccggcgaacccgggcaccaccgccacgtacctcgagggcaacatgctcatcaccagcgagagcgagacgcagccggtgaaccgcgtggcgtacaacgtcggcgggcagatggccaccaacaaccagagctccaccactgcccccgcgaccggcacgtacaacctccaggaaatcgtgcccggcagcgtgtggatggagagggacgtgtacctccaaggacccatctgagccaagatcccagagacgggggcgcactttcacccctctccggccatgggcggattcggactcaaacacccaccgcccatgatgctcatcaagaacacgcctgtgcccggaaatatcaccagcttctcggacgtgcccgtcagcagcttcatcacccagtacagcaccgggcaggtcaccgtggagatggagtgggagctcaagaaggaaaactccaagaggtggaacccagagatccagtacacaaacaactacaacgacccccagtttgtggactttgccccggacagcaccggggaatgcagaaccaccagacctatcggaacccgataccttacccgacccctttaa

SEQ ID NO: 829 - DNA, 2175 bp, synthetic construct
  misc_feature 1..2175: note = Description of Artificial Sequence: Synthetic polynucleotide
  source 1..2175: mol_type = other DNA
atgtcttttgttgatcaccctccagattggttggaagaagttggtgaaggtcttcgcgagtttttgggccttgaagcgggcccaccgaaaccaaaacccaatcagcagcatcaagatcaagcccgtggtcttgtgctgcctggttataactatctcggacccggaaacggtctcgatcgaggagagcctgtcaacagggcagacgaggtcgcgcgagagcacgacatctcgtacaacgagcagcttgaggcgggagacaacccctacctcaagtacaaccacgcggacgccgagtttcaggagaagctcgccgacgacacatccttcgggggaaacctcggaaaggcagtctttcaggccaagaaaagggttctcgaaccttttggcctggttgaagagggtgctaagacggcccctaccggaaagcggatagacgaccactttccaaaaagaaagaaggcccggaccgaagaggactccaagccttccacctcgtcagacgccgaagctggacccagcggatcccagcagctgcaaatcccagcccaaccagcctcaagtttgggagctgatacaatgtctgcgggaggtggcggcccattgggcgacaataaccaaggtgccgatggagtgggcaatgcctcgggagattggcattgcgattccacgtggatgggggacagagtcgtcaccaagtccacccgaacctgggtgctgcccagctacaacaaccaccagtaccgagagatcaaaagcggctccgtcgacggaagcaacgccaacgcctactttggatacagcaccccctgggggtactttgactttaaccgcttccacagccactggagcccccgagactggcaaagactcatcaacaactactggggcttcagaccccggtccctcagagtcaaaatcctcaacattcaagtcaaagaggtcacggtgcaggactccaccaccaccatcgccaacaacctcacctccaccgtccaagtgtttacggacgacgactaccagctgccctacgtcgtcggcaacgggaccgagggatgcctgccggccttccctccgcaggtctttacgctgccgcagtacggttacgcgacgctgaaccgcgacaacacagaaaatcccaccgagaggagcagcttcttctgcctagagtactttcccagcaagatgctgagaacgggcaacaactttgagtttacctacaactttgaggaggtgcccttccactccagcttcgctcccagtcagaacctcttcaagctggccaacccgctggtgggccagtacttgtaccgcttcgtgagcacaaataacactggcggagtccagttcaacgagaacctggccgggagatacgccaacacctacaaaaactggttcccggggcccatgggccgaacccagggctggaacctgggctccggggtcaaccgcgccagtgtcagcgccttcgccacgaccaataggatggagctcgagggcgcgagttaccaggtgcccccgcagccgaacggcatgaccaacaacctccagggcagcaacacctatgccctggagaacactatgatcttcaacagccagccggcgaacccgggcaccaccgccacgtacctcgagggcaacatgctcatcaccagcgagagcgagacgcagccggtgaaccgcgtggcgtacaacgtcggcgggcagatggccaccaacaaccagagctccaccactgcccccgcgaccggcacgtacaacctccaggaaatcgtgcccggcagcgtgtggatggagagggacgtgtacctccaaggacccatctgggccaagatcccagagacgggggcgcactttcacccctctccggccatgggcggattcggactcaaacacccaccgcccatgatgctcatcaagaacacgcctgtgcccggaaatatcaccagcttctcggacgtgcccgtcagcagcttcatcacccagtacagcaccgggcaggccaccgtggagatggagtgggagctcaagaaggaaaactccaagaggtggaacccagagatccagtacacaaacaactacaacgacccccagtttgtggactttgccccggacagcaccggggaatacagaaccaccagacctatcggaacccgataccttacccgacccctttaa

SEQ ID NO: 830 - DNA, 2175 bp, synthetic construct
  misc_feature 1..2175: note = Description of Artificial Sequence: Synthetic polynucleotide
  source 1..2175: mol_type = other DNA
atgtcttttgttgatcaccctccagattggttggaagaagttggtgaaggtcttcgcgagtttttgggccttgaagcgggcccaccgaaaccaaaacccaatcagcagcatcaagatcaagcccgtggtcttgtgctgcctggttataactatctcggacccggaaacggcctcgatcgaggagagcctgtcaacagggcagacgaggtcgcgcgagagcacgacatctcgtacaacgagcagcttgaggcgggagacaacccctacctcaagtacaaccacgcggacgccgagtttcaggagaagctcgccgacgacacatccttcgggggaaacctcggaaaggcagtctttcaggccaagaaaagggttctcgaaccttttggcctggttgaagagggtgctaagacggcccctaccggaaagcggatagacgaccactttccaaaaagaaagaaggcccggaccgaagaggactccaagccttccacctcgtcagacgccgaagctggacccagcggatcccagcagctgcaaatcccagcccaaccagcctcaagtttgggagctgatacaatgtctgcgggaggtggcggcccattgggcgacaataaccaaggtgccgatggagtgggcaatgcctcgggagattggcattgcgattccacgtggatgggggacagagtcgtcaccaagtccacccgaacctgggtgctgcccagctacaacaaccaccagtaccgagagatcaaaagcggctccgtcgacggaagcaacgccaacgcctactttggatacagcaccccctgggggtactttgactttaaccgcttccacagccactggagcccccgagactggcaaagactcatcaacaactactggggcttcagaccccggtccctcagagtcaaaatcttcaacattcaagtcaaagaggtcacggtgcaggactccaccaccatcatcgccaacaacctcacctccaccgtccaagtgtttacggacgacgactaccagctgccctacgtcgtcggcaacgggaccgagggatgcctgccggccttccctccgcaggtctttacgctgccgcagtacggttacgcgacgctgaaccgcgacaacacagaaaatcccaccgagaggagcagcttcttctgcctagagtactttcccagcaagatgctgagaacgggcaacaactttgagtttacctacaactttgaggaggtgcccttccactccagcttcgcccccagtcagaacctcttcaagctggccaacccgctggtggaccagtacttgtaccgcttcgtgagcacaaataacactggcggagtccagttcaacaagaacctggccgggagatacgccaacacctacaaaaactggttcccggggcccatgggccgaacccagggctggaacctgggctccggggtcaaccgcgccagtgtcagcgccttcgccacgaccaataggatggagctcgagggcgcgagttaccaggtgcccccgcagccgaacggcatgaccaacaacctccagggcagcaacacctatgccctggagaacactatgatcttcaacagccagccggcgaacccgggcaccaccgccacgtacctcgagggcaacatgctcatcaccagcgagagcgagacgcagccggtgaaccgcgtggcgtacaacgtcggcgggcagatggccaccaacaaccagagctccaccactgcccccgcgaccggcacgtacaacctccaggaaatcgtgcccggcagcgtgtggatggagagggacgtgtacctccaaggacccatctgggccaagatcccagagacgggggcgcactttcacccctctccggccatgggcggattcggactcaaacacccaccgcccatgatgctcatcaagaacacgcctgtgcccggaaatatcaccagcttctcggacgtgcccgtcagcagcttcatcacccagtacagcaccgggcaggtcaccgtggagatggagtgggagctcaagaaggaaaactccaagaggtggaacccagagatccagtacacaaacaactacaacgacccccagtttgtggactttgccccggacagcaccggggaatacagaaccaccagacctatcggaacccgataccttacccgacccctttaa

SEQ ID NO: 831 - DNA, 2175 bp, synthetic construct
  misc_feature 1..2175: note = Description of Artificial Sequence: Synthetic polynucleotide
  source 1..2175: mol_type = other DNA
atgtcttttgttgatcaccctccagattggttggaagaagttggtgaaggtcttcgcgagtttttgggccttgaagcgggcccaccgaaaccaaaacccaatcagcagcatcaagatcaagcccgtggtcttgtgctgcctggttataactatctcggacccggaaacggtctcgatcgaggagagcctgtcaacagggcagacgaggtcgcgcgagagcacgacatctcgtacaacgagcagcttgaggcgggagacaacccctacctcaagtacaaccacgcggacgccgagtttcaggagaagctcgccgacgacacatccttcgggggaaacctcggaaaggcagtctttcaggccaagaaaagggttctcgaaccttttggcctggttgaagagggtgctaagacggcccctaccggaaagcggatagacgaccactttccaaaaagaaagaaggcccggaccgaagaggactccaagccttccacctcgtcagacgccgaagctggacccagcggatcccagcagctgcaaatcccagcccaaccagcctcaagtttgggagctgatacaatgtctgcgggaggtggcggcccattgggcgacaataaccaaggtgccgatggagtgggcaatgcctcgggagattggcattgcgattccacgtggatgggggacagagtcgtcaccaagtccacccgaacctgggtgctgcccagctacaacaaccaccagtaccgagagatcaaaagcggctccgtcgacggaagcaacgccaacgcctactttggatacagcaccccctgggggtactttgactttaaccgcttccacagccactggagcccccgagactggcaaagactcatcaacaactactggggcttcagaccccggtccctcagagtcaaaatcttcaacattcaagtcaaagaggtcacggtgcaggactccaccaccaccatcgccaacaacctcacctccaccgtccaagtgtttacggacgacgactaccagctgccctacgtcgtcggcaacgggaccgagggatgcctgccggccttccctccgcaggtctttacgctgccgcagtacggttacgcgacgctgaaccgcgacaacacagaaaatcccaccgagaggagcagcttcttctgcctagagtactttcccagcaagatgctgagaacgggcaacaactttgagtttacctacaactttgaggaggtgcccttccactccagcttcgctcccagtcagaacctcttcaagctggccaacccgctggtggaccagtacttgtaccgcttcgtgagcacaaataacactggcggagtccagttcaacaagaacctggccgggagatacgccaacacctacaaaaactggttcccggggcccatgggccgaacccagggctggaacctgggctccggggtcaaccgcgccagtgtcagcgccttcgccacgaccaataggatggagctcgagggcgcgagttaccaggtgcccccgcagccgaacggcatgaccaacaacctccagggcagcaacacctatgccctggagaacactatgatcttcaacagccagccggcgaacccgggcaccaccgccacgtacctcgagggcaacatgctcatcaccagcgagagcgagacgcagccggtgaaccgcgtggcgtacaacgtcggcgggcagatggccaccaacaaccagagctccaccactgcccccgcgaccggcacgtacaacctccaggaaatcgtgcccggcagcgtgtggatggagagggacgtgtacctccaaggacccatctgggccaagatcccagagacgggggcgcactttcacccctctccggccatgggcggattcggactcaaacacccaccgcccatgatgctcatcaagaacacgcctgtgcccggaaatatcaccagcctctcggacgtgcccgtcagcagcttcatcacccagtacagcaccgggcaggtcaccgtggagatggagtgggagctcaagaaggaaaactccaagaggtggaacccagagatccagtacacaaacaactacaacgacccccagtttgtggactttgccccggacagcaccggggaatacagaaccaccagacctatcggaacccgataccttacccgacccctttaa

SEQ ID NO: 832 - DNA, 2175 bp, synthetic construct
  misc_feature 1..2175: note = Description of Artificial Sequence: Synthetic polynucleotide
  source 1..2175: mol_type = other DNA
atgtcttttgttgatcaccctccagattggttggaagaagttggtgaaggtcttcgcgagtttttgggccttgaagcgggcccaccgaaaccaaaacccaatcagcagcatcaagatcaagcccgtggtcttgtgctgcctggttataactatctcggacccggaaacggtctcgatcgaggagagcctgccaacagggcagacgaggtcgcgcgagagcacgacatctcgtacaacgagcagcttgaggcgggagacaacccctacctcaagtacaaccacgcgggcgccgagtttcaggagaagctcgccgacgacacatccttcgggggaaacctcggaaaggcagtctttcaggccaagaaaagggttctcgaaccttttggcctggttgaagagggtgctaagacggcccctaccggaaagcggatagacgaccactttccaaaaagaaagaaggcccggaccgaagaggactccaagccttccacctcgtcagacgccgaagctggacccagcggatcccagcagctgcaaatcccagcccaaccagcctcaagtttgggagctgatacaatgtctgcgggaggtggcggcccattgggcgacaataaccaaggtgccgatggagtgggcaatgcctcgggagattggcattgcgattccacgtggatgggggacagagtcgtcaccaagtccacccgaacctgggtgctgcccggctacaacaaccaccagtaccgagagatcaaaagcggctccgtcgacggaagcaacgccaacgcctactttggatacagcaccccctgggggtactttgactttaaccgcttccacagccactggagcccccgagactggcaaagactcatcaacaactactggggcttcagaccccggtccctcagagtcaaaatcttcaacattcaagtcaaagaggtcacggtgcaggactccaccaccaccatcgccaacaacctcacctccaccgtccaagtgtttacggacgacgactaccagctgccctacgtcgtcggcaacgggaccgagggatgcctgccggccttccctccgcaggtctttacgctgccgcagtacggttacgcgacgctgaaccgcgacaacacagaaaatcccaccgagaggagcagcttcttctgcctagagtactttcccagcaagatgctgagaacgggcaacaactttgagtttacctacaactttgaggaggtgcccttccactccagcttcgctcccagtcagaacctcttcaagctggccaacccgctggtggaccagtacttgtaccgcttcgtgagcacaaataatactggcggagtccagttcaacaagaacctggccgggagatacgccaacacctacaaaaactggttcccggggcccatgggccgaacccagggctggaacctgggctccggggtcaaccgcgccagtgtcagcgccttcgccacgaccaataggatggagctcgagggcgcgagttaccaggtgcccccgcagccgaacggcatgaccaacaacctccagggcagcaacacctatgccctggagaacactatgatcttcaacagccagccggcgaacccgggcaccaccgccacgtacctcgagggcaacatgctcatcaccagcgagagcgagacgcagccggtgaaccgcgtggcgtacaacgtcggcgggcagatggccaccaacaaccagagctccaccactgcccccgcgaccggcacgtacaacctccaggaaatcgtgcccggcagcgtgtggatggagagggacgtgtacctccaaggacccatctgggccaagatcccagagacgggggcgcactttcacccctctccggccatgggcggattcggactcaaacacccaccgcccatgatgctcatcaagaacacgcctgtgcccggaaatatcaccagcttctcggacgtgcccgtcagcagcttcatcacccagtacagcaccgggcaggtcaccgtggagatggagtgggagctcaagaaggaaaactccaagaggtggaacccagagatccagtacacaaacaactacaacgacccccagtttgtggactttgccccggacagcaccggggaatacagaaccaccagacctatcggaacccgataccttacccgacccctttaa

SEQ ID NO: 833 - DNA, 2175 bp, synthetic construct
  misc_feature 1..2175: note = Description of Artificial Sequence: Synthetic polynucleotide
  source 1..2175: mol_type = other DNA
atgtcttttgttgatcaccctccagattggttggaagaagttggtgaaggtcttcgcgagtttttgggccttgaagcgggcccaccgaaaccaaaacccaatcagcagcatcaagatcaagcccgtggtcttgtgctgcctggttataactatctcggacccggaaacggtctcgatcgaggagagcctgtcaacagggcagacgaggtcgcgcgagagcacgacatctcgtacaacgagcagcttgaggcgggagacaacccctacctcaagtacaaccacgcggacgccgagtttcaggagaagctcgccgacgacacatccttcgggggaaacctcggaaaggcagtctttcaggccaagaaaagggttctcgaaccttttggcctggttgaagagggtgctaagacggcccctaccggaaagcggatagacgaccactttccaaaaagaaagaaggcccggaccgaagaggactccaagcctcccacctcgtcagacgccgaagctggacccagcggatcccagcagctgcaaatcccagcccaaccagcctcaagtttgggagctgatacaatgtctgcgggaggtggcggcccattgggcgacaataaccaaggtgccgatggagtgggcaatgcctcgggagattggcattgcgattccacgtggatgggggacagagtcgtcaccaagtccacccgaacctgggtgctgcccagctacaacaaccaccagtaccgagagatcaaaagcggctccgtcgacggaagcaacgccaacgcctactttggatacagcaccccctgggggtactttgactttaaccgcttccacagccactggagcccccgagactggcaaagactcatcaacaactactggggcttcagaccccggtccctcagagtcaaaatcttcaacattcaagtcaaagaggtcacggtgcaggactccgccaccaccatcgccaacaacctcacctccaccgtccaagtgtttacggacgacgactaccagctgccctacgtcgtcggcaacgggaccgagggatgcctgccggccttccctccgcaggtctttacgctgccgcagtacggttacgcgacgctgaaccgcgacaacacagaaaatcccaccgagaggagcagcttcttctgcctagagtactttcccagcaagatgctgagaacgggcaacaactttgagtttacctacaactttgaggaggtgcccttccactccagcttcgctcccagtcagaacctcttcaagctggccaacccgctggtggaccagtacttgtaccgcttcgtgagcacaaataacactggcggagtccagttcaacaagaacctggccgggagatacgccaacacctacaaaaactggttcccggggcccatgggccgaacccagggctggaacctgggctccggggtcaaccgcgccagtgtcagcgccttcgccacgaccaataggatggagctcgagggcgcgagttaccaggtgcccccgcagccgaacggcatgaccaacaacctccagggcagcaacacctatgccctggagaacactatgatcttcaacagccagccggcgaacccgggcaccaccgccacgtacctcgagggcaacatgctcatcaccagcgagagcgagacgcagccggtgaaccgcgtggcgtacaacgtcggcgggcagatggccaccaacaaccagagctccaccactgcccccgcgaccggcacgtacaacctccaggaaatcgtgcccggcagcgtgtggatggagagggacgtgtacctccaaggacccatctgggccaagatcccagagacgggggcgcactttcacccctctccggccatgggcggattcggactcaaacacccaccgcccatgatgctcatcaagaacacgcctgtgcccggaaatatcaccagcttctcggacgtgcccgtcagcagcttcatcacccagtacagcaccgggcaggtcaccgtggagatggagtgggagctcaagaaggaaaactccaagaggtggaacccagagatccagtacacaaacaactacaacgacccccagtttgtggactttgccccggacagcaccggggaatacagaaccaccagacctatcggaacccgataccttacccgacccctttaa

SEQ ID NO: 834 - DNA, 2175 bp, synthetic construct
  misc_feature 1..2175: note = Description of Artificial Sequence: Synthetic polynucleotide
  source 1..2175: mol_type = other DNA
atgtcttttgttgatcaccctccagattggttggaagaagttggtgaaggtcttcgcgagtttttgggccttgaagcgggcccaccgaaaccaaaacccaatcagcagcatcaagatcaagcccgtggtcttgtgctgcctggttataactatctcggacccggaaacggtctcgatcgaggagagcctgtcaacagggcagacgaggtcgcgcgagagcacgacatctcgtacaacgagcagcttgaggcgggagacaacccctacctcaagtacaaccacgcggacgccgagtttcaggagaagctcgccgacgacacatccttcgggggaaacctcggaaaggcagtctttcaggccaagaaaagggttctcgaaccttttggcctggttgaagagggtgctaagacggcccctaccggaaagcggatagacgaccactttccaaaaagaaagaaggcccggaccgaagaggactccaagccttccacctcgtcagacgccgaagctggacccagcggatcccagcagccgcaaatcccagcccaaccagcctcaagtttgggagctgatacaatgtctgcgggaggtggcggcccattgggcgacaataaccaaggtgccgatggagtgggcaatgcctcgggagattggcattgcgattccacgtggatgggggacagagtcgtcaccaagtccacccgaacctgggtgctgcccagctacaacaaccaccagtaccgagagatcaaaagcggctccgtcgacggaagcaacgccaacgcctactttggatacagcaccccctgggggtactttgactttaaccgcttccacagccactggagcccccgagactggcaaagactcatcaacaactactggggcttcagaccccggtccctcagagtcaaaatcttcaacattcaagtcaaagaggtcacggtgcaggactccaccaccaccatcgccaacaacctcacctccaccgtccaagtgtttacggacgacgactaccagctgccctacgtcgtcggcaacgggaccgagggatgcctgccggccttccctccgcaggtctttacgctgccgcagtacggttacgcgacgctgaaccgcgacaacacagaaaatcccaccgagaggagcagcttcttctgcctagagtactttcccagcaagatgctgagaacgggcaacaactttgagtttacctacaactttgaggaggtgcccttccactccagcttcgctcccagtcagaacctcttcaagctggccaacccgctggtggaccagtacttgtaccgcttcgtgagcacaaataacactggcggagtccagttcaacaagaacctggccgggagatacgccaacacctacaaaaactggttcccggggcccatgggccgaacccagggctggaacctgggctccggggtcaaccgcgccagtgtcagcgccttcgccacgaccaataggatggagctcgagggcgcgagttaccaggtgcccccgcagccgaacggcatgaccaacaacctccagggcagcaacacctatgccctggagaacactatgatcttcaacagccagccggcgaacccgggcaccaccgccacgtacctcgagggcaacatgctcatcaccagcgagagcgagacgcagccggtgaaccgcgtggcgtacaacgtcggcgggcagatggccaccaacaaccagagctccaccactgcccccgcgaccggcacgtacaacctccaggaaatcgtgcccggcagcgtgtggatggagagggacgtgtacctccaaggacccatctgggccaagatcccagagacgggggcgcactttcacccctctccggccatgggcggattcggactcaaacacccaccgcccatgatgctcatcaagaacacgcctgcgcccggaaatatcaccagcttctcggacgtgcccgtcagcagcttcatcacccagtacagcaccgggcaggtcaccgtggagatggagtgggagctcaagaaggaaaactccaagaggtggaacccagagatccagtacacaaacaactacaacgacccccagtttgtggactttgccccggacagcaccggggaatacagaaccaccagacctatcggaacccgataccttacccgacccctttaa

SEQ ID NO: 835 - DNA, 2175 bp, synthetic construct
  misc_feature 1..2175: note = Description of Artificial Sequence: Synthetic polynucleotide
  source 1..2175: mol_type = other DNA
atgtcttttgttgatcaccctccagattggttggaagaagttggtgaaggtcttcgcgagtttttgggccttgaagcgggcccaccgaaaccaaaacccaatcagcagcatcaagatcaagcccgtggtcttgtgctgcctggttataactatctcggacccggaaacggtctcgatcgaggagagcctgtcaacagggcagacgaggtcgcgcgagagcacgacatctcgtacaacgagcagcttgaggcgggagacaacccctacctcaagtacaaccacgcggacgccgagtttcaggagaagctcgccgacgacacatccttcgggggaaacctcggaaaggcagtctttcaggccaagaaaagggttctcgaaccttttggcctggttgaagagggtgctaagacggcccctaccggaaagcggatagacgaccactttccaaaaagaaagaaggcccggaccgaagaggactccaagcctcccacctcgtcagacgccgaagctggacccagcggatcccagcagctgcaaatcccagcccaaccagcctcaagtttgggagctgatacaatgtctgcgggaggtggcggcccattgggcgacaataaccaaggtgccgatggagtgggcaatgcctcgggagattggcattgcgattccacgtggatgggggacagagtcgtcaccaagtccacccgaacctgggtgctgcccagctacaacaaccaccagtaccgagagatcaaaagcggctccgtcgacggaagcaacgccaacgcctactttggatacagcaccccctgggggtactttgactttaaccgcttccacagccactggagcccccgagactggcaaagactcatcaacaactactggggcttcagaccccggtccctcagagtcaaaatcttcaacattcaagtcaaagaggtcacggtgcaggactccaccaccaccatcgccaacaacctcacctccaccgtccaagtgtttacggacgacgactaccagctgccctacgtcgtcggcaacgggaccgagggatgcctgccggccttccctccgcaggtctttacgctgccgcagtacggttacgcgacgctgaaccgcgacaacacagaaaatcccaccgagaggagcagcttcttctgcctagagtactttcccagcaagatgctgagaacgggcaacaactttgagtttacctacaactttgaggaggtgcccttccactccagcttcgctcccagtcagaacctcttcaagctggccaacccgctggtggaccagtacttgtaccgcttcgtgagcacaaataacactggcggagtccagttcaacaagaacctggccgggagatacgccaacacctacaaaaactggttcccggggcccatgggccgaacccagggctggaacctgggctccggggtcaaccgcgccagtgtcagcgccttcgccacgaccaataggatggagctcgagggcgcgagttaccaggtgcccccgcagccgaacggcatgaccaacaacctccagggcagcaacacctatgccctggagaacactatgatcttcaacagccagccggcgaacccgggcaccaccgccacgtacctcgagggcaacatgctcatcaccagcgagagcgagacgcagccggtgaaccgcgtggcgtacaacgtcggcgggcagatggccaccaacaaccagagctccaccactgcccccgcgaccggcacgtacaacctccaggaaatcgtgcccggcagcgtgtggatggagagggacgtgtacctccaaggacccatctgggccaagatcccagagacgggggcgcactttcacccctctccggccatgggcggattcggactcaaacacccaccgcccatgatgctcatcaagaacacgcctgtgcccggaaatatcaccagcttctcggacgtgcccgtcagcagcttcatcacccagtacagcaccgggcaggtcaccgtggagatggagtgggagctcaagaaggaaaactccaagaggtggaacccagagatccagtacacaaacaactacaacgacccccagtttgtggactttgccccggacagcaccggggaatacagaaccaccagacctatcggaacccgataccttacccgacccctttaa

SEQ ID NO: 836 - DNA, 2175 bp, synthetic construct
  misc_feature 1..2175: note = Description of Artificial Sequence: Synthetic polynucleotide
  source 1..2175: mol_type = other DNA
atgtcttttgttgatcaccctccagattggttggaagaagttggtgaaggtcttcgcgagtttttgggccttgaagcgggcccaccgaaaccaaaacccaatcagcagcatcaagatcaagcccgtggtcttgtgctgcctggttataactatctcggacccggaaacggtctcgatcgaggagagcctgtcaacagggcagacgaggtcgcgcgagagcacgacatctcgtacaacgagcagcttgaggcgggagacaacccctacctcaagtacaaccacgcggacgccgagtttcaggagaagctcgccgacgacacatccttcgggggaaacctcggaaaggcagtctttcaggccaagaaaagggttctcgaaccttttggcctggttgaagagggtgctaagacggcccctaccggaaagcggatagacgaccactttccaaaaagaaagaaggcccggaccgaagaggactccaagcctcccacctcgtcagacgccgaagctggacccagcggatcccagcagctgcaaatcccagcccaaccagcctcaagtttgggagctgatacaatgtctgcgggaggtggcggcccattgggcgacaataaccaaggtgccgatggagtgggcaatgcctcgggagattggcattgcgattccacgtggatgggggacagagtcgtcaccaagtccacccgaacctgggtgccgcccagctacaacaaccaccagtaccgagagatcaaaagcggctccgtcgacggaagcaacgccaacgcctactttggatacagcaccccctgggggtactttgactttaaccgcttccacagccactggagcccccgagactggcaaagactcatcaacaactactggggcttcagaccccggtccctcagagtcaaaatcttcaacattcaagtcaaagaggtcacggtgcaggactccaccaccaccatcgccaacaacctcacctccaccgtccaagtgtttacggacgacgactaccagctgccctacgtcgtcggcaacgggaccgagggatgcctgccggccttccctccgcaggtctttacgctgccgcagtacggttacgcgacgctgaaccgcgacaacacagaaaatcccaccgagaggagcagcttcttctgcctagagtactttcccagcaagatgctgagaacgggcaacaactttgagtttacctacaactttgaggaggtgcccttccactccagcttcgctcccagtcagaacctcttcaagctggccaacccgctggtggaccagtacttgtaccgcttcgtgagcacaaataacactggcggagtccagttcaacaagaacctggccgggagatacgccaacacctacaaaaactggttcccggggcccatgggccgaacccagggctggaacctgggctccggggtcaaccgcgccagtgtcagcgccttcgccacgaccaataggatggagctcgagggcgcgagttaccaggtgcccccgcagccgaacggcatgaccaacaacctccagggcagcaacacctatgccctggagaacactatgatcttcaacagccagccggcgaacccgggcaccaccgccacgtacctcgagggcaacatgctcatcaccagcgagagcgagacgcagccggtgaaccgcgtggcgtacaacgtcggcgggcagatggccaccaacaaccagagctccaccactgcccccgcgaccggcacgtacaacctccaggaaatcgtgcccggcagcgtgtggatggagagggacgtgtacctccaaggacccatctgggccaagatcccagagacgggggcgcactttcacccctctccggccatgggcggattcggactcaaacacccaccgcccatgatgctcatcaagaacacgcctgtgcccggaaatatcaccagcttctcggacgtgcccgtcagcagcttcatcacccagtacagcaccgggcaggtcgccgtggagatggagtgggagctcaagaaggaaaactccaagaggtggaacccagagatccagtacacaaacaactacaacgacccccagtttgtggactttgccccggacagcaccggggaatacagaaccaccagacctatcggaacccgataccttacccgacccctttaa

SEQ ID NO: 837 - DNA, 2175 bp, synthetic construct
  misc_feature 1..2175: note = Description of Artificial Sequence: Synthetic polynucleotide
  source 1..2175: mol_type = other DNA
atgtcttttgttgatcaccctccagattggttggaagaagttggtgaaggtcttcgcgagtttttgggccttgaagcgggcccaccgaaaccaaaacccaatcagcagcatcaagatcaagcccgtggtcttgtgctgcctggttataactatctcggacccggaaacggtctcgatcgaggagagcctgtcaacagggcagacgaggtcgcgcgagagcacgacatctcgtacaacgagcagcttgaggcgggagacaacccctacctcaagtacaaccacgcggacgccgagtttcaggagaagctcgccgacgacacatccttcgggggaaacctcggaaaggcagtctttcaggccaagaaaagggttctcgaaccttttggcctggttgaagagggtgctaagacggcccctaccggaaagcggatagacgaccactttccaaaaagaaagaaggcccggaccgaagaggactccaagccttccacctcgtcagacgccgaagctggacccagcggatcccagcagctgcaaatcccagcccaaccagcctcaagtttgggagctgatacaatgtctgcgggaggtggcggcccattgggcgacaataaccaaggtgccgatggagtgggcaatgcctcgggagattggcattgcgattccacgtggatgggggacagagtcgtcaccaagtccacccgaacctgggtgctgcccagctacaacaaccaccagtaccgagagatcaaaagcggctccgtcgacggaagcaacgccaacgcctactttggatacagcaccccctgggggtactttgactttaaccgcttccacagccactggagcccccgagactggcaaagactcatcaacaactactggggcttcagaccccggtccctcagagtcaaaatcttcaacattcaagtcaaagaggtcacggtgcaggactccaccaccaccatcgccaacaacctcacctccaccgtccaagtgtttacggacgacgactaccagctgccctacgtcgtcggcaacgggaccgagggatgcctgccggccttccctccgcaggtctttacgctgccgcagtacggttacgcgacgctgaaccgcgacaacacagaaaatcccaccgagaggagcagcttcttctgcctagagtactttcccagcaagatgctgagaacgggcaacaactttgagtttacctacaactttgaggaggtgcccttccactccagcttcgctcccagtcagaacctcttcaagctggccaacccgctggtggaccagtacttgtaccgcttcgtgagcacaaataacactggcggagtccagttcaacaagaacctggccgggagatacgccaacacctacaaaaactggttcccggggcccatgggccgaacccagggctggaacctgggctccggggtcaaccgcgccagtgtcagcgccttcgccacgaccaataggatggagctcgagggcgcgagttaccaggtgcccccgcagccgaacggcatgaccaacaacctccagggcagcaacacctatgccctggagaacactatgatcttcaacagccagccggcgaacccgggcaccaccgccacgtacctcgagggcaacatgctcatcaccagcgagagcgagacgcagccggtgaaccgcgtggcgtacaacgtcggcgggcagatggccaccaacaaccagagctccaccactgcccccgcgaccggcacgtacaacctccaggaaatcgtgcccggcagcgtgtggatggagagggacgtgtacctccaaggacccatctgggccaagatcccagagacgggggcgcactttcacccctctccggccatgggcggattcggactcaaacacccaccgcccatgatgctcatcaagaacacgcctgcgcccggaaatatcaccagcttctcggacgtgcccgtcagcagcttcatcacccagtacagcaccgggcaggtcaccgtggagatggagtgggagctcaagaaggaaaactccaagaggtggaacccagagatccagtacacaaacaactacaacgacccccagtttgtggactttgccccggacagcaccggggaatacagaaccaccagacctatcggaacccgataccttacccgacccctttaa

SEQ ID NO: 838 - DNA, 2175 bp, synthetic construct
  misc_feature 1..2175: note = Description of Artificial Sequence: Synthetic polynucleotide
  source 1..2175: mol_type = other DNA
atgtcttttgttgatcaccctccagattggttggaagaagttggtgaaggtcttcgcgagtttttgggccttgaagcgggcccaccgaaaccaaaacccaatcagcagcatcaagatcaagcccgtggtcttgtgctgcctggttataactatctcggacccggaaacggtctcgatcgaggagagcctgtcaacagggcagacgaggtcgcgcgagagcacgacatctcgtacaacgagcagcttgaggcgggagacaacccctacctcaagtacaaccacgcggacgccgagtttcaggagaagctcgccgacgacacatccttcgggggaaacctcggaaaggcagtctttcaggccaagaaaagggttctcgaaccttttggcctggctgaagagggtgctaagacggcccctaccggaaagcggatagacgaccactttccaaaaagaaagaaggcccggaccgaagaggactccaagccttccacctcgtcagacgccgaagctggacccagcggatcccagcagctgcaaatcccagcccaaccagcctcaagtttgggagctgatacaatgtctgcgggaggtggcggcccattgggcgacaataaccaaggtgccgatggagtgggcaatgcctcgggagattggcattgcgattccacgtggatgggggacagagtcgtcaccaagtccacccgaacctgggtgctgcccagctacaacaaccaccagtaccgagagatcaaaagcggctccgtcgacggaagcaacgccaacgcctactttggatacagcaccccctgggggtactttgactttaaccgcttccacagccactggagcccccgagactggcaaagactcatcaacaactactggggcttcagaccccggtccctcagagccaaaatcttcaacattcaagtcaaagaggtcacggtgcaggactccaccaccaccatcgccaacaacctcacctccaccgtccaagtgtttacggacgacgactaccagctgccctacgtcgtcggcaacgggaccgagggatgcctgccggccttccctccgcaggtctttacgctgccgcagtacggttacgcgacgctgaaccgcgacaacacagaaaatcccaccgagaggagcagcttcttctgcctagagtactttcccagcaagatgctgagaacgggcaacaaccttgagtttacctacaactttgaggaggtgcccttccactccagcttcgctcccagtcagaacctcttcaagctggccaacccgctggtggaccagtacttgtaccgcttcgtgagcacaaataacactggcggagtccagttcaacaagaacctggccgggagatacgccaacacctacaaaaactggttcccggggcccatgggccgaacccagggctggaacctgggctccggggtcaaccgcgccagtgtcagcgccttcgccacgaccaataggatggagctcgagggcgcgagttaccaggtgcccccgcagccgaacggcatgaccaacaacctccagggcagcaacacctatgccctggagaacactatgatcttcaacagccagccggcgaacccgggcaccaccgccacgtacctcgagggcaacatgctcatcaccagcgagagcgagacgcagccggtgaaccgcgtggtgcacaacgtcggcgggcagatggccaccaacaaccagagctccaccactgcccccgcgaccggcacgtacaacctccaggaaatcgtgcccggcagcgtgtggatggagagggacgtgtacctccaaggacccatctgggccaagatcccagagacgggggcgcactttcacccctctccggccatgggcggattcggactcaaacacccaccgcccatgatgctcatcaagaacacgcctgtgcccggaaatatcaccagcttctcggacgtgcccgtcagcagcttcatcacccagtacagcaccgggcaggtcaccgtggagatggagtgggagctcaagaaggaaaactccaagaggtggaacccggagatccagtacacaaacaactacaacgacccccagtttgtggactttgccccggacagcaccggggaatacagaaccaccagacctatcggaacccgataccttacccgacccctttaa

SEQ ID NO: 839 - DNA, 2175 bp, synthetic construct
  misc_feature 1..2175: note = Description of Artificial Sequence: Synthetic polynucleotide
  source 1..2175: mol_type = other DNA
atgtcttttgttgatcaccctccagattggttggaagaagttggtgaaggtcttcgcgagtttttgggccttgaagcgggcccaccgaaaccaaaacccaatcagcagcatcaagatcaagcccgtggtcttgtgctgcctggttataactatctcggacccggaaacggtctcgatcgaggagagcctgtcaacagggcagacgaggtcgcgcgagagcacgacatctcgtacaacgagcagcttgaggcgggagacaacccctacctcaagtacaaccacgcggacgccgagtttcaggagaagctcgccgacgacacatccttcgggggaaacctcggaaaggcagtctttcaggccaagaaaagggttctcgaaccttttggcctggttgaagagggtgctaagacggcccctaccggaaagcggatagacgaccactttccaaaaagaaagaaggcccggaccgaagaggactccaagccttccacctcgtcagacgccgaagctggacccagcggatcccagcagctgcaaatcccagcccaaccagcctcaagtttgggagctgatacaatgtctgcgggaggtggcggcccattgggcgacaataaccaaggtgccgatggagtgggcaatgcctcgggagattggcattgcgattccacgtggatgggggacagagtcgtcaccaagtccacccgaacctgggtgctgcccagctacaacaaccaccagtaccgagagatcaaaagcggctccgtcgacggaggcaacgccaacgcctactttggatacagcaccccctgggggtactttgactttaaccgcttccacagccactggagcccccgggactggcaaagactcatcaacaactactggggcttcagaccccggtccctcagagtcaaaatcttcaacattcaagtcaaagaggtcacggtgcaggactccaccaccaccatcgccaacaacctcacctccaccgtccaagtgtttacggacgacgactaccagctgccctacgtcgtcggcaacgggaccgagggatgcctgccggccttccctccgcaggtctttacgctgccgcagtacggttacgcgacgctgaaccgcgacaacacagaaaatcccaccgagaggagcagcttcttctgcctagagtactttcccagcaagatgctgagaacgggcaacaactttgagtttacctacaactttgaggaggtgcccttccactccagcttcgctcccagtcagaacctcttcaagctggccaacccgctggtggaccagtacttgtaccgcttcgtgagcacaaataacactggcggagtccagttcaacaagaacctggccgggagatacgccaacacctacaaaaactggttcccggggcccatgggccgaacccagggctggaacctgggctccggggtcaaccgcgccagtgtcagcgccttcgccacgaccaataggatggagctcgagggcgcgagttaccaggtgcccccgcagccgaacggcatgaccaacaacctccagggcagcaacacctatgccctggagaacactatgatcttcaacagccagccggcgaacccgggcaccaccgccacgtacctcgagggcaacatgctcatcaccagcgagagcgagacgcagccggtgaaccgcgtggcgtacaacgtcggcgggcagatggccaccaacaaccagagctccaccactgcccccgcgaccggcacgtacaacctccaggaaatcgtgcccggcagcgtgtggatggagagggacgtgtacctccaaggacccatctgggccaagatcccagagacgggggcgcactttcacccctctccggccatgggcggattcggactcaaacacccaccgcccatgatgctcatcaagaacacgcctgcgcccggaaatatcaccagcttctcggacgtgcccgtcagcagcttcatcacccagtacagcaccgggcaggtcaccgtggagatggagtgggagctcaagaagggaaactccaagaggtggaacccagagatccagtacacaaacaactacaacgacccccagtttgtggactttgccccggacagcaccggggaatacagaaccaccagacctatcggaacccgataccttacccgacccctttaa

SEQ ID NO: 840 - DNA, 2175 bp, synthetic construct
  misc_feature 1..2175: note = Description of Artificial Sequence: Synthetic polynucleotide
  source 1..2175: mol_type = other DNA
atgtcttttgttgatcaccctccagattggttggaagaagttggtgaaggtcttcgcgagtttttgggccttgaagcgggcccaccgaaaccaaaacccaatcagcagcatcaagatcaagcccgtggtcttgtgctgcctggttataactatctcggacccggaaacggtctcgatcgaggagagcctgtcaacagggcagacgaggtcgcgcgagagcacgacatctcgtacaacgagcagcttgaggcgggagacaacccctacctcaagtacaaccacgcggacgccgagtttcaggagaagctcgccgacgacacgtccttcgggggaaacctcggaaaggcagtctttcaggccaagaaaagggttctcgaaccttttggcctggttgaagagggtgctaagacggcccctaccggaaagcggatagacgaccactttccaaaaagaaagaaggcccggaccgaagaggactccaagccttccacctcgtcagacgccgaagctggacccagcggatcccagcagctgcaaatcccagcccaaccagcctcaagtttgggagctgatacaatgtctgcgggaggtggcggcccattgggcgacaataaccaaggtgccgatggagtgggcaatgcctcgggagattggcattgcgattccacgtggatgggggacagagtcgtcaccaagtccacccgaacctgggtgctgcccagctacaacaaccaccagtaccgagagatcaaaagcggctccgtcgacggaagcaacgccaacgcctactttggatacagcaccccctgggggtactttgactttaaccgcttccacagccactggagcccccgagactggcaaagactcatcaacaactactggggcttcagaccccggtccctcagagtcaaaatcttcaacattcaagtcaaagaggtcacggtgcaggactccaccaccaccatcgccaacaacctcacctccaccgtccaagtgtttacggacgacgactaccagctgccctacgtcgtcggcaacgggaccgagggatgcctgccggccttccctccgcaggtctttacgctgccgcagtacggttacgcgacgctgaaccgcgacaacacagaaaatcccaccgagaggagcagcttcttctgcctagagtactttcccagcaagatgctgagaacgggcaacaactttgagtttacctacaactttgaggaggtgcccttccactccagcttcgctcccagtcagaacctcttcaagctggccaacccgctggtggaccagtacttgtaccgcttcgtgagcacaaataacactggcggagtccagttcaacaagaacctggccgggagatacgccaacacctacaaaaactggttcccggggcccatgggccgaacccagggctggaacctgggctccggggtcaaccgcgccagtgtcagcgccttcgccacgaccaataggatggagctcgagggcgcgagttaccaggtgcccccgcagccgaacggcatgaccaacaacctccagggcagcaacacctatgccctggagaacactatgatcttcaacagccagccggcgaacccgggcaccaccgccacgtacctcgagggcaacatgctcatcaccagcgagagcgagacgcagccggtgaaccgcgtggcgtacaacgtcggcgggcagatggccaccaacaaccagagctccaccactgcccccgcgaccggcacgtacaacctccaggaaatcgtgcccggcagcgtgtggatggagagggacgtgtacctccaaggacccatctgggccaagatcccagagacgggggtgcactttcacccctctccggccatgggcggattcggactcaaacacccaccgcccatgatgctcatcaagaacacgcctgtgcccggaaatatcaccagcttctcggacgtgcccgtcagcagcttcatcacccagtacagcaccgggcaggtcaccgtggagatggagtgggagctcaagaaggaaaactccaagaggtggaacccagagatccagtacacaaacaactacaacgacccccagtttgtggactttgccccggacagcaccggggaatacagaaccaccagacctatcggaacccgataccttacccgacccctttaa

SEQ ID NO: 841 - DNA, 2175 bp, synthetic construct
  misc_feature 1..2175: note = Description of Artificial Sequence: Synthetic polynucleotide
  misc_difference 1652: note = modified_base - a, c, t, g, unknown or other
  source 1..2175: mol_type = other DNA
atgtcttttgttgatcaccctccagattggttggaagaagttggtgaaggtcttcgcgagtttttgggccttgaagcgggcccaccgaaaccaaaacccaatcagcagcatcaagatcaagcccgtggtcttgtgctgcctggttataactatctcggacccggaaacggtctcgatcgaggagagcctgtcaacagggcagacgaggtcgcgcgagagcacgacatctcgtacaacgagcagcttgaggcgggagacaacccctacctcaagtacaaccacgcggacgccgagtttcaggagaagctcgccgacgacacatccttcgggggaaacctcggaaaggcagtctttcaggccaagaaaagggttctcgaaccttttggcctggttgaagagggtgctaagacggcccctaccggaaagcggatagacgaccactttccaaaaagaaagaaggcccggaccgaggaggactccaagccttccacctcgtcagacgccgaagctggacccagcggatcccagcagctgcaaatcccagcccaaccagcctcaagtttgggagctgatacaatgtctgcgggaggtggcggcccattgggcgacaataaccaaggtgccgatggagtgggcaatgcctcgggagattggcattgcgattccacgtggatgggggacagagtcgtcaccaagtccacccgaacctgggtgctgcccagctacaacaaccaccagtaccgagagatcaaaagcggctccgtcgacggaagcaacgccaacgcctactttggatacagcaccccctgggggtactttgactttaaccgcttccacagccactggagcccccgagactggcaaagactcatcaacaactactggggcttcagaccccggtccctcagagtcaaaatcttcaacattcaagtcaaagaggtcacggtgcaggactccaccaccaccatcgccaacaacctcacctccaccgtccaagtgtttacggacgacgactaccagctgccctacgtcgtcggcaacgggaccgagggatgcctgccggccttccctccgcaggtctttacgctgccgcagtacggttacgcgacgctgaaccgcgacaacacagaaaatcccaccgagaggagcagcttcttctgcctagagtactttcccagcaagatgctgagaacgggcaacaactttgagtttacctacaactttgaggaggtgcccttccactccagcttcgctcccagtcagaacctcttcaagctggccaacccgctggtggaccagtacttgtaccgcttcgtgagcacaaataacactggcggagtccagttcaacaagaacctggccgggagatacgccaacacctacaaaaactggttcccggggcccatgggccgaacccagggctggaacctgggctccggggtcaaccgcgccagtgtcagcgccttcgccacgaccaataggatggagctcgagggcgcgagttaccaggtgcccccgcagccgaacggcatgaccaacaacctccagggcagcaacacctatgccctggagaacactatgatcttcaacagccagccggcgaacccgggcaccaccgccacgtacctcgagggcagcatgctcatcaccancgagagcgagacgcagccggtgaaccgcgtggcgtacaacgtcggcgggcagatggccaccaacaaccagagctccaccactgcccccgcgaccggcacgtacaacctccaggaaatcgtgcccggcagcgtgtggatggagagggacgtgtacctccaaggacccatctgggccaagatcccagagacgggggcgcactttcacccctctccggccatgggcggattcggactcaaacacccaccgcccatgatgctcatcaagaacacgcctgtgcccggaaatatcaccagcttctcggacgtgcccgtcagcagcttcatcacccagtacagcaccgggcaggtcaccgtggagatggagtgggagctcaagaaggaaaactccaagaggtggaacccagagatccagtacacaaacaactacaacgacccccagtttgtggactttgccccggacagcaccggggaatacagaaccaccagacctatcggaacccgataccttacccgacccctttaa

SEQ ID NO: 842 - DNA, 2211 bp, synthetic construct
  misc_feature 1..2211: note = Description of Artificial Sequence: Synthetic polynucleotide
  source 1..2211: mol_type = other DNA
atggctgctgacggttatcttccagattggctcgaggacaacctttctgaaggcattcgtgagtggtgggctctgaaacctggagtccctcaacccaaagcgaaccaacaacaccaggacaaccgtcggggtcttgtgcttccgggttacaaatacctcggacccggtaacggactcgacaaaggagagccggtcaacgaggcggacgcggcagccctcgaacacgacaaagcttacgaccagcagctcaaggccggtgacaacccgtacctcaagtacaaccacgccgacgccgagtttcaggagcgtcttcaagaagatacgtcttttgggggcaaccttggcagagcagtcttccaggccaaaaagaggatccttgagcctcttggtctggttgaggaagcagctaaaacggctcctggaaagaagaggcctgtagatcagtctcctcaggaaccggactcatcatctggtgttggcaaatcgggcaaacagcctgccagaaaaagactaaatttcggtcagactggcgactcagagtcagtcccagaccctcaacctctcggagaaccaccagcagcccccacaagtttgggatctaatacaatggcttcaggcggtggcgcaccaatggcagacaataacgagggtgccgatggagtgggtaattcctcaggaaattggcattgcgattcccaatggctgggcgacagagtcatcaccaccagcaccagaacctgggccctgcccacttacaacaaccatctctacaagcaaatctccagccaatcaggagcttcaaacgacaaccactactttggctacagcaccccttgggggtattttgactttaacagattccactgccacttctcaccacgtgactggcagcgactcattaacaacaactggggattccggcccaagaaactcagcttcaagctcttcaacatccaagttaaagaggtcacgcagaacgatggcacgacgactattgccaataaccttaccagcacggttcaagtgtttacggactcggagtatcagctcccgtacgtgctcgggtcggcgcaccaaggctgtctcccgccgtttccagcggacgtcttcatggtccctcagtatggatacctcaccctgaacaacggaagtcaagcggtgggacgctcatccttttactgcctggagtacttcccttcgcagatgctaaggactggaaataacttccaattcagctataccttcgaggatgtaccttttcacagcagctacgctcacagccagagtttggatcgcttgatgaatcctcttattgatcagtatctgtactacctgaacagaacgcaaggaacaacctctggaacaaccaaccaatcacggctgctttttagccaggctgggcctcagtctatgtctttgcaggccagaaattggctacctgggccctgctaccggcaacagagactttcaaagactgctaacgacaacaacaacagtaactttccttggacagcggccagcaaatatcatctcaatggccgcgactcgctggtgaatccaggaccagctatggccagtcacaaggacgatgaagaaaaatttttccctatgcacggcaatctaatatttggcaaagaagggacaacggcaagtaacgcagaattagataatgtaatgattacggatgaagaagagattcgtaccaccaatcctgtggcaacagagcagtatggaactgtggcaaataacttgcagagctcaaatacagctcccacgactagaactgtcaatgatcagggggccttacctggcatggtgtggcaagatcgtgacgtgtaccttcaaggacctatctgggcaaagattcctcacacggatggacactttcatccttctcctctgatgggaggctttggactgaaacatccgcctcctcaaatcatgatcaaaaatactccggtaccggcaaatcctccgacgactttcagcccggccaagtttgcttcatttatcactcagtactccactggacaggtcagcgtggaaattgagtgggagctacagaaagaaaacagcaaacgttggaatccagagattcagtacacttccaactacaacaagtctgttaatgtggactttactgtagacactaatggtgtttatagtgaacctcgccctattggaacccggtatctcacacgaaacttgtaa

SEQ ID NO: 843 - DNA, 2205 bp, synthetic construct; identical to SEQ ID NO: 111
  misc_feature 1..2205: note = Description of Artificial Sequence: Synthetic polynucleotide
  source 1..2205: mol_type = other DNA

SEQ ID NO: 844 - DNA, 2234 bp, synthetic construct
  misc_feature 1..2234: note = Description of Artificial Sequence: Synthetic polynucleotide
  source 1..2234: mol_type = other DNA
atgtcttttgttgatcaccctccagattggttggaagaagttggtgaaggtcttcgcgagtttttgggccttgaagcgggcccaccgaaaccaaaacccaatcagcagcatcaagatcaagcccgtggtcttgtgctgcctggttataactatctcggacccggaaacggtctcgatcgaggagagcctgtcaacagggcagacgaggtcgcgcgagagcacgacatctcgtacaacgagcagcttgaggcgggagacaacccctacctcaagtacaaccacgcggacgccgagtttcaggagaagctcgccgacgacacatccttcgggggaaacctcggaaaggcagtctttcaggccaagaaaagggttctcgaaccttttggcctggttgaagagggtgctaagacggcccctaccggaaagcggatagacgaccactttccaaaaagaaagaaggctcggaccgaagaggactccaagccttccacctcgtcagacgccgaagctggacccagcggatcccagcagctgcaaatcccagcccaaccagcctcaagtttgggagctgatacaatgtctgcgggaggtggcggcccattgggcgacaataaccaaggtgccgatggagtgggcaatgcctcgggagattggcattgcgattccacgtggatgggggacagagtcgtcaccaagtccacccgaacctgggtgctgcccagctacaacaaccaccagtaccgagagatcaaaagcggctccgtcgacggaagcaacgccaacgcctactttggatacagcaccccctgggggtactttgactttaaccgcttccacagccactggagcccccgagactggcaaagactcatcaacaactactggggcttcagaccccggtccctcagagtcaaaatcttcaacattcaagtcaaagaggtcacggtgcaggactccaccaccaccatcgccaacaacctcacctccaccgtccaagtgtttacggacgacgactaccagctgccctacgtcgtcggcaacgggaccgagggatgcctgccggccttccctccgcaggtctttacgctgccgcagtacggttacgcgacgctgaaccgcgacaacacagaaaatcccaccgagaggagcagcttcttctgcctagagtactttcccagcaagatgctgagaacgggcaacaactttgagtttacctacaactttgaggaggtgcccttccactccagcttcgctcccagtcagaacctgttcaagctggccaacccgctggtggaccagtacttgtaccgcttcgtgagcacaaataacactggcggagtccagttcaacaagaacctggccgggagatacgccaacacctacaaaaactggttcccggggcccatgggccgaacccagggctggaacctgggctccggggtcaaccgcgccagtgtcagcgccttcgccacgaccaataggatggagctcgagggcgcgagttaccaggtgcccccgcagccgaacggcatgaccaacaacctccagggcagcaacacctatgccctggagaacactatgatcttcaacagccagccggcgaacccgggcaccaccgccacgtacctcgagggcaacatgctcatcaccagcgagagcgagacgcagccggtgaaccgcgtggcgtacaacgtcggcgggcagatggccaccaacaaccagagctccaccactgcccccgcgaccggcacgtacaacctccaggaaatcgtgcccggcagcgtgtggatggagagggacgtgtacctccaaggacccatctgggccaagatcccagagacgggggcgcactttcacccctctccggccatgggcggattcggactcaaacacccaccgcccatgatgctcatcaagaacacgcctgtgcccggaaatatcaccagcttctcggacgtgcccgtcagcagcttcatcacccagtacagcaccgggcaggtcaccgtggagatggagtgggagctcaagaaggaaaactccaagaggtggaacccagagatccagtacacaaacaactacaacgacccccagtttgtggactttgccccggacagcaccggggaatacagaaccaccagacctatcggaacccgataccttacccgacccctttaacccattcatgtcgcataccctcaataaaccgtgtattcgtgtcagtaaaatactgcctc

SEQ ID NO: 845 - protein, 736 aa, synthetic construct
  REGION 1..736: note = Description of Artificial Sequence: Synthetic polypeptide
MAADGYLPDWLEDNLSEGIREWWALKPGVPQPKANQQHQDNRRGLVLPGYKYLGPGNGLDKGEPVNEADAAALEHDKAYDQQLKAGDNPYLKYNHADAEFQERLQEDTSFGGNLGRAVFQAKKRILEPLGLVEEAAKTAPGKKRPVDQSPQEPDSSSGVGKSGKQPARKRLNFGQTGDSESVPDPQPLGEPPAAPTSLGSNTMASGGGAPMADNNEGADGVGNSSGNWHCDSQWLGDRVITTSTRTWALPTYNNHLYKQISSQSGASNDNHYFGYSTPWGYFDFNRFHCHFSPRDWQRLINNNWGFRPKKLSFKLFNIQVKEVTQNDGTTTIANNLTSTVQVFTDSEYQLPYVLGSAHQGCLPPFPADVFMVPQYGYLTLNNGSQAVGRSSFYCPEYFPSQMLRTGNNFQFSYTFEDVPFHSSYAHSQSLDRLMNPLIDQYLYYLNRTQGTTSGTTNQSRLLFSQAGPQSMSLQARNWLPGPCYRQQRLSKTANDNNNSNFPWTAASKYHLNGRDSLVNPGPAMASHKDDEEKFFPMHGNLIFGKEGTTASNAELDNVMITDEEEIRTTNPVATEQYGTVANNLQSSNTAPTTRTVNDQGALPGMVWQDRDVYLQGPIWAKIPHTDGHFHPSPLMGGFGLKHPPPQIMIKNTPVPANPPTTFSPAKFASFITQYSTGQVSVEIEWELQKENSKRWNPEIQYTSNYNKSVNVDFTVDTNGVYSEPHPIGTRYLTRNL

SEQ ID NO: 846 - protein, 736 aa, synthetic construct
  REGION 1..736: note = Description of Artificial Sequence: Synthetic polypeptide
MAADGYLPDWLEDNLSEGIREWWALKPGVPQPKANQQHQDNRRGLVLPGYKYLGPGNGLDKGEPVNEADAAALEHDKAYDQQLKAGDNPYLKYNHADAEFQERLQEDTSFGGNLGRAVFQAKKRILEPLGLVEEAAKTAPGKKRPVDQSPQEPDSSSGVGKSGKQPARKRLNFGQTGDSESVPDPQPLGEPPAAPTSLGSNTMASGGGAPMADNNEGADGVGNSSGNWHCDSQWLGDRVITTSTRTWALPTYNNHLYKQISSQSGASNDNHYFGYSTPWGYFDFNRFHCHFSPRDWQRLINNNWGFRPKKLSFKLFNIQVKEVTQNDGTTTVANNLTSTVQVFTDSEYQLPYVLGSAHQGCLPPFPADVFMVPQYGYLTLNNGSQAVGRSSFYCLEYFPSQMLRTGNNFQFSYTFEDVPFHSSYAHSQSLDRLMNPLIDQYLYYLNRTQGTTSGTTNQSRLLFSQAGPQSMSLQARNWLPGPCYRQQRLSKTANDNNNSNFPWTAASKYHLNGRDSLVNPGPAMASHKDDEEKFFPMHGNLIFGKEGTTASNAELDNVMITDEEEIRTTNPVATEQYGTVANNLQSSNTAPTTRTVNDQGALPGMVWQDRDVYLQGPIWAKIPHTDGHFHPSPLMGGFGLKHPPPQIMIKNTPVPANPPTTFSPAKFASFITQYSTGQVSVEIEWELQKENSKRWNPEIQYTSNYNKSVNVDFTVDTNGVYSEPRPIGTRYLTRNL

SEQ ID NO: 847 - protein, 736 aa, synthetic construct
  REGION 1..736: note = Description of Artificial Sequence: Synthetic polypeptide
MAADGYLPDWLEDNLSEGIREWWALKPGVPQPKANQQHQDNRRGLVLPGYKYLGPGNGLDKGEPVNEADAAALEHDKAYDQQLKAGDNPYLKYNHADAEFQERLQEDTSFGGNLGRAVFQAKKRILEPLGLVEEAAKTAPGKKRPVDQSPQEPDSSSGVGKSGKQPARKRLNFGQTGDSESVPDPQPLGEPPAAPTSLGSNTMASGGGAPMADNNEGADGVGNSSGNWHCDSQWLGDRVITTSTRTWALPTYNNHLYKQISGQSGASNDNHYFGYSTPWGYFDFNRFHCHFSPRDWQRLINNNWGFRPKKLSFKLFNIQVKEVTQNDGTTTIANNLTSTVQVFTDSEYQLPYVLGSAHQGCLPPFPADVFMVPQYGYLTLNNGSQAVGRSSFYCLEYFPSQMLRTGNNFQFSYTFEDVPFHSSYAHSQSLDRLMNPLIDQYLYYLNRTQGTTSGTTNQSRLLFSQAGPQSMSLQARNWLPGPCYRQQRLSKTANGNNNSNFPWTAASKYHLNGRDSLVNPGPAMASHKDDEEKFFPMHGNLIFGKEGTTASNAELDNVMITDEEEIRTTNPVATEQCGTVANNLQSSNTAPTTRTVNDQGALPGMVWQDRDVYLQGPIWAKIPHTDGHFHPSPLMGGFGLKHPPPQIMIKNTPVPANPPTTFSPAKFASFITQYSTGQVSVEIEWELQKENSKRWNPEIQYTSNYNKSVNVDFTVDTNGVYSEPRPIGTRYLTRNL

SEQ ID NO: 848 - protein, 736 aa, synthetic construct
  REGION 1..736: note = Description of Artificial Sequence: Synthetic polypeptide
MAADGYLPDWLEDNLSEGIREWWALKPGVPQPKANQQHQDNRRGLVLPGYKYLGPGNGLDKGEPVNEADAAALEHDKAYDQQLKAGDNPYLKYNHADAEFQERLQEDTSFGGNLGRAVFQAKKRILEPLGLVEGAAKTAPGKKRPVDQSPQEPDSSSGVGKSGKQPARKRLNFGQTGDSESVPDPQPLGEPPAAPTSLGSNTMASGGGAPMADNNEGADGVGNSSGNWHCDSQWLGDRVITTSTRTWALPTYNSHLYKQISSQSGASNDNHYFGYSTPWGYFDFNRFHCHFSPRDWQRLINNNWGFRPKKLSFKLFNIQVKEVTQNDGTTTIANNLTSTVQVFTDSEYQLPYVLGSAHQGCLPPFPADAFMVPQYGYLTLNNGSQAVGRSSFYCLEYFPSQMLRTGNNFQFSYTFEDVPFHGSYAHSQSLDRLMNPLIDQYLYYLNRTQGTTSGTTNQSRLLFSQAGPQSMSLQARNWLPGPCYRQQRLSKTANDNNNSNFPWTAASKYHLNGRDSLVNPGPAMASHKDDEEKFFPMHGNLIFGKEGTTASNAELDNVMITDEEEIRTTNPVATEQYGTVANNLQSSNTAPTTRTVNDQGALPGMVWQDRDVYLQGPIWAKIPHTDGHFHPSPLMGGFGLKHPPPQIMIKNTPVPANPPTTFSPAKFASFITQYSTGQVSVEIEWELQKENSKRWNPEIQYTSNYNKSVNVDFTVDTNGVYSEPRPIGTRYLTRNS

SEQ ID NO: 849 - protein, 736 aa, synthetic construct
  REGION 1..736: note = Description of Artificial Sequence: Synthetic polypeptide
MAADGYLPDWLEDNLSEGIREWWALKPGVPQPKANQQHQDNRRGLVLPGYKYLGPGNGLDKGEPVNEADAAALEHDKAYDQQLKAGDNPYLKYNHADAEFQERLQEDTSFGGNLGRAVFQAKKRILEPLGLVEGAAKTAPGKKRPVDQSPQEPDSSSGVGKSGKQLARKRLNFGQTGDSESVPDPQPLGEPPAAPTSLGSNTMASGGGAPMADNNEGADGVGNSSGNWHCDSQWLGDRVITTSTRTWALPTYNSHLYKQISGQSGASNDNHYFGYSTPWGYFDFNRFHCHFSPRDWQRLINNNWGFRPKKLSFKLFNIQVKEVTQNDGTTTIANNLTSTVQVFTDSEYQLPYVLGSAHQGCLPPFPADVFMVPQYGYLTLNNGSQAVGRSSFYCLEYFPSQMLRTGNNFQFSYTFEDVPFHSSYAHSQSLDRLMNPLIDQYLYYLNRTQGTTSGTTNQSRLLFSQAGPQSMSLQARNWLPGPCYRQQRLSKTANDNNNSNFPWTAASKYHLNGRDSLVNPGPAMASHKDDEEKFFPMHGNLIFGKEGTTASNAELDNVMITDEEEIRTTNPVATEQYGTVANNLQSSNTAPTTRTVNDQGALPGMVWQDRDVYLQGPIWAKIPHTDGHFHPSPLMGGFGLKHPPPQIMIKNTPVPANPPTTFSPAKFASFITQYSTGQVSVEIEWELQKENSKRWNPEIQYTSNYNKSVNVDFTVDTNGVYSEPRPIGTRYLTRNL

SEQ ID NO: 850 - protein, 736 aa, synthetic construct
  REGION 1..736: note = Description of Artificial Sequence: Synthetic polypeptide
MAADGYLPDWLEDNLSEGIREWWALKPGVPQPKANQQHQDDRRGLVLPGYKYLGPGNGLDKGEPVNEADAAALEHDKAYDQQLKAGDNPCLKYNHADAEFQERLQEDTSFGGNLGRAVFQAKKRILEPLGLVEEAAKTAPGKKRPVDQSPQEPDSSSGVGKSGKQPARKRLNFGQTGDSESVPDPQPLGEPPAAPTSLGSNTMASGGSAPMADNNEGADGVGNSSGNWHCDSQWLGDRVITTSTRTWALPTYNNHLYKQISSQSGASNDNHYFGYSTPWGYFDFNRFHCHFSPRDWQRLINNNWGFRPKKLSFKLFNIQVKEVTQNDGTTTIANNLTSTVQVFTDSEYQLPYVLGSAHQGCLPPFPADVFMVPQYGYLTLNNGSQAVGRSSFYCLEYFPSQMLRTGNNFQFSYTFEDVPFHSSYAHSQSLDRLMDPLIDQYLYYLNRTQGTTSGTTNQSRLLFSQAGPQSMSLQARNWLPGPCYRQQRLSKTANDNNNSNFPWTAASKYHLNGRDSLVNPGPAMASHKDDEEKFFPMHGNLIFGKEGTTASNAELDNVMITDEEEIRTTNPVATEQYGTVANNLQSSNTAPTTRTVNDQGALPGMVWQDRDVYLQGPIWAKIPHTDGHFHPSPLMGGFGLKHPPPQIMIKNTPVPANPPTTFSPAKFASFITQYSTGQVSVEIEWELQKENSKRWNPEIQYTSNYNKSVNVDFTVDTNGVYSEPRPIGTRYLTRNL

SEQ ID NO: 851 - protein, 736 aa, synthetic construct
  REGION 1..736: note = Description of Artificial Sequence: Synthetic polypeptide
MAADGYLPDWLEDNLSEGIREWWALKPGVPQPKANQQHQDDRRGLVLPGYKYLGPGNGLDKGEPVNEADAAALEHDKAYDQQLKAGDNPYLKYNHADAEFQERLQEDTSFGGNLGRAVFQAKKRILEPLGLVEEAAKTAPGKKRPVDQSPQEPDSSSGVGKSGKQPARKRLNFGQTGDSESVPDPQPLGEPPAAPTSLGSNTMASGGGAPMADNNEGADGVGNSSGNWHCDSQWLGNRVITTSTRTWALPTYNNHLYKQISSQSGASNDNHYFGYSTPWGYFDFNRFHCHFSPRDWQRLINNNWGFRPKKLSFKLFNIQVKEVTQNDGTTTIANNLTSTVQVFTDSEYQLPYVLGSAHQGCLPPFPADVFMVPQYGYLTLNNGSQAVGRSSFYCLEYFPSQMLRTGNNFQFSYTFEDVPFHSSYAHSQSLDRLMNPLIDQYLYYLNRTQGTTSGTTNQSRLLFSQAGPQSMSLQARNWLPGPCYRQQRLSKTANDNNNSNFPWTAASKYHLNGRDSLVNPGPAMASHKDDEEKFFPMHGNLIFGKEGTTASNAELDNVMITDEEEIRTTNPVATEQYGTVANNLQSSNTAPTTRTVNDQGALPGMVWQDRDVYLQGPIWAKIPHTDGHFHPSPLMGGFGLKHPPPQIMIKNTPVPANPPTTFSPAKFASFITQYSTGQVSVEIEWELQKENSKRWNPEIQYTSNYNKSVNVDFTVDTNGVYSEPRPIGTRYLTRNL

SEQ ID NO: 852 - protein, 736 aa, synthetic construct
  REGION 1..736: note = Description of Artificial Sequence: Synthetic polypeptide
MAADGYLPDWLEDNLSEGIREWWALKPGVPQPKANQQHQDDRRGLVLPGYKYLGPGNGLDKGEPVNEADAAALEHDKAYDQQLKAGDNPYLKYNHADAEFQERLQEDTSFGGNLGRAVFQAKKRILEPLGLVEEAAKTAPGKKRPVDQSPQEPDSSSGVGKSGKQPARKRLNFGQTGDSESVPDPQPLGEPPAAPTSLGSNTMASGGGAPMADNNEGADGVGNSSGNWHCDSQWLGDRVITTSTRTWALPTYNNHLYKQISSQSGASNDNHYFGYSTPWGYFDFNRFHCHFSPRDWQRLINNNWGFRPKKLSFKLFNIQVKEVTQNDGTTTIANNLTSTVQVFTDSEYQLPYVLGSAHQGCLPPFPADVFMVPQYGYLTLNNGSQAVGRSSFYCLEYFPSQMLRTGNNFQFSYTFEDVPFHSSYAHSQSLDRLMNPLIDQYLYYLNRTQGTTSGTTNQSRLLFSQAGPQSMSLQARNWLPGPCYRQQRLSKTANDNNNSNFPWTAASKYHLNGRDSLVNPGPAMASHKDDEEKFFPMHGNLIFGKEGTTASNAELDNVMITDEEEIRTTNPVATVQYGTVANNLQSSNTAPTTRTVNDQGALPGMVWQDRDVYLQGPIWAKIPHTDGHFHPSPLMGGFGLKHPPPQIMIKNTPVPANPPTTFSPAKFASFITQYSTGQVSVEIEWELQKENSKRWNPEIQYTSNYNKSVNVDFTVDTNGVYSEPRPIGTRYLTRNL

SEQ ID NO: 853 - protein, 735 aa, synthetic construct
  REGION 1..735: note = Description of Artificial Sequence: Synthetic polypeptide
MAADGYLPDWLEDNLSEGIREWWALKPGVPQPKANQQHQDNRRGLVLPGYKYLGPGNGLDKGEPVNEADAAALEHDKAYDQQLKAGDNPYLKYNHADAEFQERLQEDTSFGGNLGRAVFQAKKGILEPLGLVEEAAKTAPGKKRPVDQSPQEPDSSSGVGKSGKQPARKRLNFGQTGDSESVPDPQPLGEPPAAPTSLGSNTMASGGGAPMADNNEGADGVGNSSGNWHCDSQWLGDRVITTSTRTWALPTYNNHLYKQISSQSGASNDNHYFGYSTPWGYFDFNRFHCHFSPRDWQRLINNNWGFRPKKLSFKLFNIQVKEVTQNDGTTTIANNLTSTVQVFTDSEYQLPYVFGSAHQGCLPPFPADVFMVPQYGYLTLNNGSQAVGRSSFYCLEYFPSQMLRTGNNFQFSYTFEDVPFHSSYAHSQSSDRLMNPLIDQYLYYLNRTQGTTSGTTNQSRLLFSQAGPQSMSLQARNWLPGPCYRQQRLSKTANDNNNSNFPTAASKYHLNGRDSLVNPGPAMASHKDDEEKFFPMHGNLIFGKEGTTASNAELDNVMITDEEEIRTTNPVATEQYGTVANNLQSSNTAPTTRTVNDQGALPGMVWQDRDVYLQGPIWAKIPHTDGHFHPSPLMGGFGLKHPPPQIMIKNTPVPANPPTTFSPAKFASFITQYSTGQVSVEIEWELQKENSKRWNPEIQYTSNYNKSVNVDFTVDTNGVYSEPRPIGTRYLTRNL

SEQ ID NO: 854 - protein, 736 aa, synthetic construct
  REGION 1..736: note = Description of Artificial Sequence: Synthetic polypeptide
MAADGYLPDWLEDNLSEGIREWWALKPGVPQPKANQQHQDNRRGLVLPGYKYLGPGNGLDEGEPVNEADAAALEHDKAYDQQLKAGDNPYLKYNHADAEFQERLQEDTSFGGNLGRAVFQAKKRILEPLGLVEGAAKTAPGKKRPVDQSPQEPDSSSGVGKSGKQPARKRLNFGQTGDSESVPDPQPLGEPPAAPTSLGSNTMASGGGAPMADNNEGADGVGNSSGNWHCDSQWLGDRVITTSTRTWALPTYNSHLYKQISSQSGASNDNHYFGYSTPWGYFDFNRFHCHFSPRDWQRLINNNWGFRPKKLSFKLFNIQVKEVTQNDGTTTIANNLTSTVQVFTDSEYQLPYVLGSAHQGCLPPFPADVFMVPQYGYLTLNNGSQAVGRSSFYCLEYFPSQMLRTGNNFQFSYTFEDVPFHSSYAHSQSLDRLMNPLIDQYLYYLNRTQGTTSGTTNQSRLLFSQAGPQSMSLQARNWLPGPCYRQQRLSKTANDNNNSNFPWTAASKYHLNGRDSLVNPGPAMASHKDDEEKFFPMHGNLIFGKEGTTASNAELDNVMITDEEEIRTTNPVATEQYGTVANNLQSSNTAPTTRTVNDQGALPGMVWQDRDVYLQGPIWAKIPHTDGHFHPSPLMGGFGLKHPPPQIMIKNTPVPANPPTTFSPAKFASFITQYSTGQVSVEIEWELQKENSKRWNPEIQYTSNYNKSVNVDFTVDTNGVYSEPRPIGTRYLTRNL

SEQ ID NO: 855 - protein, 668 aa, synthetic construct
  REGION 1..668: note = Description of Artificial Sequence: Synthetic polypeptide
MAADGYLPDWLEDNLSEGIREWWALKPGVPQPKANQQHQDNRRGLVLPGYKYLGPGNGLDKGEPVNEADAAALEHDKAYDQQLKAGDNPYLKYNHADAEFQERLQEDTSFGGNLGRAVFQAKKRILEPLGLVEGAAKTAPGKKRPVDQSPQEPDSSSGVGKSGKQPARKRLNFGQTGDSESVPDPQPLGEPPAAPTSLGSNTMASGGGAPMADNNEGADGVGNSSGNWHCDSQWLGDRVITTSTRTWALPTYNSHLYKQISSQSGASNDNHYFGYSTPWGILTLTDSTATSHHVTGSDSLTTTGDSGPRNSASSSSTSKLKRSRRTMARRLLPITLPARFKCLRTRSISSRTCSGRRTKAVSRRFQRTPSWSLSMDTSPTTEVKRWDAHPFTAWSTSLRRCGLEITSNSAIPSRMYLFTAATLTARVWIAILLLISICTTTERKEQPLEQPTNHGCFLARLGLSLCLCRPEIGYLGPATGNRDFQRLLTTTTTVTFLGQRPANIISMAATRWIQDQLWPVTRTMKKNFSLCTAIRGPYLAWCGKIVTCTFKDLSGQRFLTRMDTFILLLWEALDNIRLLKSSKILRYRQILRRLSARPSLLHLSLSTPLDRSAWKLSGSYRKKTANVGIQRFSTLPTTTSLLMWTLLTLMVFIVNLALLEPGISHETC

SEQ ID NO: 856 - protein, 734 aa, synthetic construct
  REGION 1..734: note = Description of Artificial Sequence: Synthetic polypeptide
MTDGYLPDWLEDNLSEGVREWWALQPGAPKPKANQQHQDNARGLVLPGYKYLGPGNGLDKGEPVNAADAAALEHDKAYDQQLKAGDNPYLKYNHADAEFQQRLQGDTSFGGNLGRAVFQAKKRVLEPLGLVEQAGETAPGKKRPLIESPQQPDSSTGIGKKGKQPAKKKLVFEDETGAGDGPPEGSTSGAMSDDSEMRAATGGAAVEGGQGADGVGNASGDWHCDSTWSEGHVTTTSTRTWVLPTYNNHLYKRLGESLQSNTYNGFSTPWGYFDFNRFHCHFSPRDWQRLINNNWGMRPKAMRVKIFNIQVKEVTTSNGETTVANNLTSTVQIFADSSYELPYVMDAGQEGSLPPFPNDVFMVPQYGYCGLVTGNTSQQQTDRNAFYCLEYFPSQMLRTGNNFEITYSFEKVPFHSMYAHSQSLDRLMNPLIDQYLWGLQSTTTGTTLNAGTATTNFTKLRPTNLSNFKKNWLPGPSIKQQGFSKTANQNYKIPATGSDSLIKYETHSTLDGRWSALTPGPPMATAGPADSKFSNSQLIFAGPKQNGNTATVPGTLIFTSEEELAATNATDTDMWGNLPGGDQSNSNLPTVDRLTALGAVPGMVWQNRDIYYQGPIWAKIPHTDGHFHPSPLIGGFGLKHPPPQIFIKNTPVPANPATTFSSTPVNSFITQYSTGQVSVQIDWEIQKERSKRWNPEVQFTSNYGQQNSLLWAPDAAGKYTEPRAIGTRYLTHHL

SEQ ID NO: 857 - protein, 734 aa, synthetic construct
  REGION 1..734: note = Description of Artificial Sequence: Synthetic polypeptide
MTDGYLPDWLEDNLSEGVREWWALQPGAPKPKANQQHQDNARGLVLPGYKYLGPGNGLDKGEPVNAADAAALEHDKAYDQQLKAGDNPYLKYNHADAEFQQRLQGDTSFGGNLGRAVFQAKKRVLEPLGLVEQAGETAPGKKRPLIESPQQPDSSTGIGKKGKQPAKKKLVFEDETGAGDGPPEGSTSGAMSDDSEMRAAAGGAAVEGGQGADGVGNASGDWHCDSTWSEGHVTTTSTRTWVLPTYNNHLYKRLGESLQSNTYNGFSTPWGYFDFNRFHCHFLPRDWQRLINNNWGVRPKAMRVKIFNIQVKEVTTSNGETTVANNLTSTVQIFADSSYELPYVMDAGQEGSLPPFPNDVFMVPQYGYCGLVTGDTSQQQTDRNAFYCLEYFPSQMLRTGNNFEITYSFEKVPFHSMYAHSQSLDRLMNPLIDQYLWGLQSTTTGTTLNAGTATTNFTKLRPTNFSNFKKNWLPGPSIKQQGFSKTANQNYKIPATGSDSLIKYETHSTLDGRWSALTPGPPMATAGPADSKFSNSQLIFAGPKQNGNTATVPGTLIFTSEEELAATNATDTDMWGNLPGGDQSNSNLPTVDRLTALGAVPGMVWQNRDIYYQGPIWAKIPHTDGHFHPSPLIGGFGLKHPPPQIFIKNTPVPANPATTFSSTPVNSFITQYSTGQVSVQIDWEIQKERSKRWNPEVQFTSNYGQQNSLLWAPDAAGKYTEPRAIGTRYLTHHL

SEQ ID NO: 858 - protein, 734 aa, synthetic construct
  REGION 1..734: note = Description of Artificial Sequence: Synthetic polypeptide
MTDGYLPDWLEDNLSEGVREWWALQPGAPKPKANQQHQDNARGLVLPGYKYLGPGNGLDEGEPVNAADAAALEHDKAYDQQLKAGDNPYLKYNHADAEFQQRLQGDTSFGGNLGRAVFQAKKRVLEPLGLVEQAGETAPGKKRPLIESPQQPDSSTGIGKKGKQPAKKKLVFEDETGAGDGPPEGSTSGAMSDDSEMRAAAGGAAVEGGQGADGVGNASGDWHCDSTWSEGHVTTTSTRTWVLPTYNNHLYKRLGESLQSNTYNGFSTPWGYFDFNRFHCHFSPRDWQRLINNNWGMRPKAMRVKIFNIQVKEVTTSNGETTVANNLTSTVQIFADSSYELPYVMDAGQEGSLPPFPNDVFMVPQYGYCGLVTGNTSQQQTDRNAFYCLEYFPSQMLRTGNNFEITYSFEKVPFHSMYAHSQSLDRLMNPLIDQYLWGLQSTTTGTTLNAGTATTNFTKLRPTNFSNFKKNWLPGPSIKQQGFSKTANQNYKIPATGSDSLIKYETHSTLDGRWSALTPGPPMATAGPADSKFSNSQLIFAGPKQNGNTATVPGTLIFTSEEELAATNATDTDMWGNLPGGDQSNSNLPTVDRLTALGAVPGMVWQNRDIYYQGPIWAKIPHTDGHFHPSPLIGGFGLKHPPPQIFIKNTPVPANPATTFSSTPVNSFITQYSTGQVSVQIDWEIQKERSKRWNPEVQFTSNYGQQNSLLWAPDAAGKYTEPRAIGTRYLTHHL

SEQ ID NO: 859 - protein, 734 aa, synthetic construct
  REGION 1..734: note = Description of Artificial Sequence: Synthetic polypeptide
MTDGYLPDWLEDNLSEGVREWWALQPGAPKPKANQQHQDNARGLVLPGYKYLGPGNGLDKGEPVNAADAAALEHDKAYDQQLKAGDNPYLKYNHADAEFQQRLQGDTSFGGNLGRAVFQAKKRVLEPLGLVEQAGETAPGKKRPLIESPQQPDSSTGIGKKGKQPAKKKLVFEDGTGAGDGPPEGSTSGAMSDDSEMRAAAGGAAVEGGQGADGVGNASGDWHCDSTWSEGHVTTTSTRTWVLPTYNNHLYKRLGESLQSNTYNGFPTPWGYFDFNRFHCHFSPRDWQRLINNNWGMRPKAMRVKIFNIQVKEVTTSNGETTAANNLTSTVQIFADSSYELPYVMDAGQEGSLPPFPNDVFMVPQYGYCGLVTGNTSQQQTDRNAFYCLEYFPSQMLRTGNNFEITYSFEKVPFHSMYAHSQSLDRLMNPLIDQYLWGLQSTTTGTTLNAGTATTNFTKLRPTNFSNFKKNWLPGPSIKQQGFSKTANQNYKIPATGSDSLIKYETHSTLDGRWSALTPGPPMATAGPADSKFSNSQLIFAGPKQNGNTATVPGTLIFTSEEELAATNATDTDMWGNLPGGDQSNSNLPTVDRLTALGAVPGMVWQNRDIYYQGPIWAKIPHTDGHFHPSPLIGGFGLKHPPPQIFIKNTPVPANPATTFSSTPVNSFITQYSTGQVSVQIDWEIQKERSKRWNPEVQFTSNYGQQNSLLWAPDAAGKYTEPRAIGTRYLTHHL

SEQ ID NO: 860 - protein, 734 aa, synthetic construct
  REGION 1..734: note = Description of Artificial Sequence: Synthetic polypeptide
MTDGYLPDWLEDNLSEGVREWWALQPGAPKPKANQQHQDNARGLVLPGYKYLGPGNGLDKGEPVNAADAAALEHDKAYDQQLKAGDNPYLKYNHADAEFQQRLQGDTSFGGNLGRAVFQAKKRVLEPLGLVEQAGETAPGKKRPLIESPQQPDSSTGIGKKGKQPAKKKLVFEDETGAGDGPPEGSTSGAMSDDSEMRAAAGGAAVEGGQGADGVGNASGDWHCDSTWSEGHVTTTSTRTWVLPTYNNHLYKRLGESLQSNTYNGFSTPWGYFDFNRFHCHFSPRDWQRLINNNWGMRPKAMRVKIFNIQVKEVTTSNGETTVANNLTSTVQIFADSSYELPYVMDAGQEGSLPPFPNDVFMVPQYGYRGLVTGNTSQQQTDRNAFYCLEYFPSQMLRTGNNFEITYSFEKVPFHSMYAHSQSLDRLMNPLIDQYLWGLQSTTTGTTLNAGTATTNFTKLRPTNFSNFKKNWLPGPSIKQQGFSKTANQNYKIPATGSDSLIKYETHSTLDGRWSALTPGPPMATAGPADSKFSNSQLIFAGPKQNGNTATVPGTLIFTSEEELAATNATDTDMWGNLPGGDQSNSNLPTVDRLTALGAVPGMVWQNRDIYYQGPIWAKIPHTDGHFHPSPLIGGFGLKHPPPQIFIKNTPVPANPATTFSSTPVNSFITQYSTGQVSVQIDWEIQKERSKRWNPEVQFTSNYGQQNSLLWAPDAAGKYTEPRAIGTRYLTHHL

SEQ ID NO: 861 - protein, 734 aa, synthetic construct
  REGION 1..734: note = Description of Artificial Sequence: Synthetic polypeptide
MTDGYLPDWLEDNLSEGVREWWALQPGAPKPKANQQHQDNARGLVLQGYKYLGPGNGLDKGEPVNAADAAALEHDKAYDQQLKAGDNPYLKYNHADAEFQQRLQGDTSFGGNLGRAVFQAKKRVLEPLGLVEQAGETAPGKKRPLIESPQQPDSSTGIGKKGKQPAKKKLVFEDETGAGDGPPEGSTSGAMSDDSEMRAAAGGAAVEGGQGADGVGNASGDWHCDSTRSEGHVTTTSTRTWVLPTYNNHLYKRLGESLQSNTYNGFSTPWGYFDFNRFHCHFSPRDWQRLINNNWGMRPKAMRVKIFNIQVKEVTTSNGETTVANNLTSTVQIFADSSYELPYVMDAGQEGSLPPFPNDVFMVPQYGYCGLVTGNTSQQQTDRNAFYCLEYFPSQMLRTGNNFEITYSFEKVPFHSMYAHSQSLDRLMNPLIDQYLWGLQSTTTGTTLNAGTATTNFTKLRPTNFSNFKKNWLPGPSIKQQGFSKTANQNYKIPATGSDSLIKYETHSTLDGRWSARTPGPPMATAGPADSKFSNSQLIFAGPKQNGNTATVPGTLIFTSEEELAATNATDTDMWGNLPGGDQSNSNLPTVDRLTALGAVPGMVWQNRDIYYQGPIWAKIPHTDGHFHPSPLIGGFGLKHPPPQIFIKNTPVPANPATTFSSTPVNSFITQYSTGQVSVQIDWEIQKERSKRWNPEVQFTSNYGQQNSLLWAPDAAGKYTEPRAIGTRYLTHHL

SEQ ID NO: 862 - protein, 724 aa, synthetic construct
  REGION 1..724: note = Description of Artificial Sequence: Synthetic polypeptide
MSFVDHPPDWLEEVGEGLREFLGLEAGPPKPKPNQQHQDQARGLVLPGYNYLGPGNGLDRGEPVNRADEVAREHDISYNEQLEAGDNPYLKYNHADAEFQERLADDTSFGGNLGKAVFQAKKRVLEPFGLVEEGAKTAPTGKRIDDHFPKRKKARTEEDSKPSTSSDAEAGPSGSQQLQIPAQPASSLGADTMSAGGGGPLGDNNQGADGVGNASGDWHCDSTWMGDRVVTKSTRTWVLPSYNNHQYREIKSGSVDGSNANAYFGYSTPWGYFDFNRFHSHWSPRDWQRLINNYWGFRPRSLRVKIFNIQVKEVTVQDSTTTIANNLTSTVQVFTDDDYQLPYVVGNGTEGCLPAFPPQVFTLPQYGYATLNRDNTENPTERSSFFCLEYFPSKMLRTGNNFEFTYNFEEVPFHSSFAPSQNLFKLANPLVDQYLYRFVSTNNTGGVQFNKNLAGRYANTYKNWFPGPMGRTQGWNLGSGVNRASVSAFATTNRMELEGASYQVPPQPNGMTNNLQGSNTYALENTMIFNSQPANPGTTATYLEGNMLITSESETQPVNRVAYNVGGQMATNNQSSTTAPATGTYNLQEIVPGSVWMERDVYLQGPIWAKIPETEAHFHPSPAMGGFGLKHPPPMMLIKNTPVPGNITSFSDVPVSSFITQYSTGQVTVEMEWELKKENSKRWNPEIQYTNNYNDPQFVDFAPDSTGEYRTTRPIGTRYLTRPL

SEQ ID NO: 863 - protein, 724 aa, synthetic construct
  REGION 1..724: note = Description of Artificial Sequence: Synthetic polypeptide
MSFVDHPPDWLEEVGEGLREFLGLEAGPPKPKPNQQHQDQARGLVLPGYNYLGPGNGLDRGEPVNRADEVAREHDISYNEQLEAGDNPYLKYNHADAEFQEKLADDTSSGGNLGKAVFQAKKRVLEPFGLVEEGAKTAPTGKRIDDHFPKRKKARTEEDSKPSTSSDAEAGPSGSQQLQIPAQPASSLGADTMSAGGGGPLGDNNQGADGVGNASGDWHCDSTWMGDRVVTKSTRTWVLPSYNNHQYREIKSGSVDGSNANAYFGYSTPWGYFDFNRFHSHWSPRDWQRLINNYWGFRPRSLRVKIFNIQVKEVTVQDSTTTIANNLTSTVQVFTDDDYQLPYVVGNGTEGCLPAFPPQVFTLPQYGYATLNRDNTENPTERSSFFCLEYFPSKMLRTGNNFEFTYNFEEVPFHSSFAPSQNLFKLANPLVDQYLYRFVSTNNTGGVQFNKNLAGRYANTYKNWFPGPMGRTQGWNLGSGVNRASVSAFATTNRMELEGASYQVPPQPNGMTNNLQGSNTYALENTMIFNSQPANPGTTATYLEGNMLITSESETQPVNRVAYNVGGQMATNNQSSTTAPATGTYNLQEIVPGSVWMERDVYLQGPIWAKIPETGAHFHPSPAMGGFGLKHPPPMMLIKNTPVPGNITSFSDVPVSSFITQYSTGQVTVEMEWELKKENSKRWNPEIQYTNNYNDPQFVDFAPDSTGEYRTTRPIGTRYLTRPL

SEQ ID NO: 864 - protein, 724 aa, synthetic construct
  REGION 1..724: note = Description of Artificial Sequence: Synthetic polypeptide
MSFVDHPPDWLEEVGEGLREFLGLEAGPPKPKPNQQHQDQARGLVLPGYNYLGPGNGLDRGEPVNRADEVAREHDISYNEQLEAGDNPYLKYNHADAEFQEKLADDTSFGGNLGKAVFQAKKRVLEPFGLVEEGAKTAPTGKRIDDHFPKRKKARTEEDSKPSTSSDAEAGPSGSQQLQIPAQPASSLGADTMSAGGGGPLGDNNQGADGVGNASGDWHCDSTWMGDRVVTKSTRTWVLPSYNNHQYREIKSGSVDGSNANAYFGYSTPWGYFDFNRFHSHWSPRDWQRLINNYWGFRPRSLRVKIFNIQVKEVTVQDSTTTIANNLTSTVQVFTDDDYQLPYVVGNGTEGCLPAFPPQVFTLPQYGYATLNRDNTENPTERSSFFCLEYFPSKMLRTGNNFEFTYNFEEVPFHSSFAPSQNLFKLANPLVDQYLYRFVSTNNTGGVQFNKNLAGRYANTYKNWFPGPMGRTQGWNLGSGVNRASVSAFATTNRMELEGASYQVPPQPNGMTNNLQGSNTYALENTMIFNSQPANPGTTATYLEGNMLITSESETQPVNRVAYNVGGQMATNNQSSTTAPATGTYNLQEIVPGSVWMERDVYLQGPIWAKIPETGAHFHPSPAMGGFGLKHPPPMMLIKSTPVPGNITSFSDVPVSSFITQYSTGQVTVEMEWELKKENSKRWNPEIQYTNNYNDPQFVDFAPDSTGEYRTTRPIGTRYLTRPL

SEQ ID NO: 865 - protein, 724 aa, synthetic construct
  REGION 1..724: note = Description of Artificial Sequence: Synthetic polypeptide
MSFVDHPPDWLEEVGEGLREFLGPEAGPPKPKPNQQHQDQARGLVLPGYNYLGPGNGLDRGEPVNRADEVAREHDISYNEQLEAGDNPYLKYNHADAEFQEKLADDTSFGGNLGKAVFQAKKRVLEPFGLVEEGAKTAPTGKRIDDHFPKRKKVRTEEDSKPSTSSDAEAGPSGSQQLQIPAQPASSLGADTMSAGGGGPLGDNNQGADGVGNASGDWHCDSTWMGDRVVTKSTRTWVPPSYNNHQYREIKSGSVDGSNANAYFGYSTPWGYFDFNRFHSHWSPRDWQRLINNYWGFRPRSLRVKIFNIQVKEVTVQDSTTTIANNLTSTVQVFTDDDYQLPYVVGNGTEGCLPAFPPQVFTLPQYGYATLNRDNTENPTERSSFFCLEYFPSKMLRTGNNFEFTYNFEEVPFHSSFAPSQNLFKLANPLVDQYLYRFVSTNNTGGVQFNKNLAGRYANTYKNWFPGPMGRTQGWNLGSGVNRASVSAFATTNRMELEGASYQVPPQPNGMTNNLQGSNTYALENTMIFNSQPANPGTTATYLEGNMLITSESETQPVNRVACNVGGQMATNNQSSTTAPATGTYNLQEIVPGSVWMERDVYLQGPIWAKIPETGAHFHPSPAMGGFGLKHPPPMMLIKNTPVPGNITSFSDVPVSSFITQYSTGQVTVEMEWELKKENSKRWNPEIQYTNNYNDPQFVDFAPDSTGEYRTTRPIGTRYLTRPL

SEQ ID NO: 866 - protein, 724 aa, synthetic construct
  REGION 1..724: note = Description of Artificial Sequence: Synthetic polypeptide
MSFVDHPPDWLEEVGEGLREFLGLEAGPPKPKPNQQHQDQARGLVLPGYNYLGPGNGLDRGEPVNRADEVAREHDISYNEQLEAGDNPYLKYNHADAEFQEKLADDTSFGGNLGKAVFQAKKRVLEPFGLVEEGAKTAPTGKRIDDHFPKRKKARTEEDSKPSTSSDAEAGPSGSQQLQIPAQPASSLGADTMSAGGGGPLGDNNQGADGVGNASGDWHCDSTWMGDRVVTKSTRTWVLPSYNNHQYREIKSGSVDGSNANAYFGYSTPWGYFDFNRFHSHWSPRDWQRLINNYWGFRPRSLRVKIFNIQVKEVTVQDSTTTIANNLTSTVQVFTDDDYQLPYVVGNGTEGCLPAFPPQVFTLPQYGYATLNRDNTENPTERSSFFCLEYFPSKMLRTGNNFEFTYNFEEVPFHSSFAPSQNLFKLANPLVDQYLYRFVSTNNTGGVQFNKNLAGRYANTYKNWFPGPMGRTQGWNLGSGVNRASVSAFATTNRMELEGASYQVPPQPNGMTNNLQGSNTYALENTMIFNSQPANPGTTATYLEGNMLITSESETQPVNRVAYNVGGQMATNNQSSTTAPATGAYNLQEIVPGSVWMERDVYLQGPIWAKIPETGAHFHPSPAMGGFGLKHPPPMMLIKNTPVPGNITSFSDVPVSSFITQYSTGQVTVEMEWELKKENSKRWNPEIQYTNNYNDPQFVDFAPDSTGEYRTTRPIGTRYLTRPL

SEQ ID NO: 867 - protein, 724 aa, synthetic construct
  REGION 1..724: note = Description of Artificial Sequence: Synthetic polypeptide
MSFVDHPPDWLEEVGEGLREFLGLEAGPPKPKPNQQHQDQARGLVLPGYNYLGPGNGLDRGEPVNRADGVAREHDISYNEQLEAGDNPYLKYNHADAEFQEKLADDTSFGGNLGKAVFQAKKRVLEPFGLVEEGAKTAPTGKRIDDHFPKRKKARTEEDSKPSTSSDAEAGPSGSQQLQIPAQPASSLGADTMSAGGGGPLGDNNQGADGVGNASGDWHCDSTWMGDRVVTKSTRTWVLPSYNNHQYREIKSGSVDGSNANAYFGYSTPWGYFDFNRFHSHWSPRDWQRLINNYWGFRPRSLRVKIFNIQVKEVTVQDSTTTIANNLTSTVQAFTDDDYQLPYVVGNGTEGCLPAFPPQVFTLPQYGYATLNRDNTENPTERSSFFCLEYFPSKMLRTGNNFEFTYNFEEVPFHSSFAPSQNLFKLANPLVDQYLYRFVSTNNTGGVQFNKNLAGRYANTYKNWFPGPMGRTQGWNLGSGVNRASVSAFATTNRMELEGASYQVPPQPNGMTNNLQGSNTYALENTMIFNSQPANPGTTATYLEGNMLITSESETQPVNRVAYNVGGQMATNNQSSTTAPATGTYNLQEIVPGSVWMERDVYLQGPIWAKIPETGAHFHPSPAMGGFGLKHPPPMMLIKNTPVPGNITSFSDVPVSSFITQYSTGQVTVEMEWELKKENSKRWNPEIQYTNNYNDPQFVDFAPDSTGEYRTTRPIGTRYLTRPL

SEQ ID NO: 868 - protein, 723 aa, synthetic construct
  REGION 1..723: note = Description of Artificial Sequence: Synthetic polypeptide
MSFVDHPPDWLEEVGEGLREFLGLEAGPPKPKPNQQHQDQARGLVLPGYNYLGPGNGLDRGEPVNRADEVAREHDISYNEQLEAGDNPYLKYNHADAEFQEKLADDTSFGGNLGKAVFQAKKRVLEPFGLVEEGAKTAPTGKRIDDHFPKRKKARTEEDSKPSTSSDAEAGPSGSQQLQIPAQPASSLGADTMSAGGGGPLGDNNQGADGVGNASGDWHCDSTWMGDRVVTKSTRTWVLPSYNNHQYREIKSGSVDGSNANAYFGYSTPWGYFDFNRFHSHWSPRDWQRLINNYWGFRPRSLRVKIFNIQVKEVTVQDSTTTIANNLTSTVQVFTDDDYQLPYVVGNGTEGCLPAFPPQVFTLPQYGYATLNRDNTENPTERSSFFCLEYFPSKMLRTGNNFEFTYNFEEVPFHSSFAPSQNLFKLANPLVDQYLYRFVSTNNTGGVQFNKNLAGRYANTYKNWFPGPMGRTQGWNLGSGVNRASVSAFATTNRMELEGASYVPPQPNGMTNNLQGSNTYALENTMIFNSQPANPGTTATYLEGNMLITSESETQPVNRVAYNVGGQMATNNQSSTTAPATGTYNLQEIVPGSVWMEGDVYLQGPIWAKIPETGAHFHPSPAMGGFGLKHPPPMMLIKNTPVPGNITSFSDVPVSSFITQYSTGQVTVEMEWELKKENSKRWNPEIQYTNNYNDPQFVDFAPDSTGEYRTTRPIGTRYLTRPL

SEQ ID NO: 869 - protein, 724 aa, synthetic construct
  REGION 1..724: note = Description of Artificial Sequence: Synthetic polypeptide
MSFVDHPPDWLEEVGEGLREFLGLEAGPPKPKPNQQHQDQARGLVLPGYNYLGPGNGLDRGEPVNRADEVAREHDISYNEQLEAGDNPYLKYNHADAEFQEKLADDTSFGGNLGKAVFQAKKRVLEPFGLVEEGAKTAPTGKRIDDHFPKRKKVRTEEDSKPSTSSDAEAGPSGSQQLQIPAQPASSLGADTMSAGGGGPLGDNNQGADGVGNASGDWHCDSTWMGDRVVTKSTRTWVLPSYNNHQYREIKSGSVDGSNANAYFGYSTPWGYFDFNRFHSHWSPRDWQRLINNYWGFRPRSLRVKIFNIQVKEVTVQDSTTTIANNLTSTVQVFTDDDYQLPYVVGNGTEGCLPAFPPQVFTLPQYGYATLNRDNTENPTERSSFFCLEYFPSKMLRTGNNFEFTYNFEEVPFHSSFAPSQNLFKLANPLVDQYLYRFVSTNNTGGVQFNKNLAGRYANTYKNWFPGPMGRTQGWNLGSGVNRASVSAFATTNRMELEGASYQVPPQPNGMTNNLQGSNTYALENTMIFNSQPANPGTTATYLEGNMLITSESETQPVNRVAYNVGGQMATNNQSSTTAPATGTYNLQEIVPGSVWMERDVYLQGPIWAKIPETGAHFHPSPAMGGFGLKHPPPMMLIKNTPVPGNITSFSDVPVSSFITQYSTGQVTVEMEWELKKENSERWNPEIQYTNNYNDPQFVDFAPDSTGEYRTTRPIGTRYLTRPL

SEQ ID NO: 870 - protein, 724 aa, synthetic construct
  REGION 1..724: note = Description of Artificial Sequence: Synthetic polypeptide
MSFVDHPPDWLEEVGEGLREFLGLEAGPPKPKPNQQHQDQARGLVLPGYNYLGPGNGLDRGEPVNRADEVAREHDISYSEQLEAGDNPYLKYNHADAEFQEKLADDTSFGGNLGKAVFQAKKRVLEPFGLVEEGAKTAPTGKRIDDHFPKRKKARTEEDSKPSTSSDAEAGPSGSQQLQIPAQPASSLGADTMSAGGGGPLGDNNQGADGVGNASGDWHCDSTWMGDRVVTKSTRTWVLPSYNNHQYREIKSGSVDGSNANAYFGYSTPWGYFDFNRFHSHWSPRDWQRLINNYWGFRPRSLRVKIFNIQVKEVTVQDSTTTIANNLTSTVQVFTDDDYQLPYVVGNGTEGCLPAFPPQVFTLPQYGYATLNRDNTENPTERSSFFCLEYFPSKMLRTGNNFEFTYNFEEVPFHSSFAPSQNLFKLANPLVDQYLYRFVSTNNTGGVQFNKNLAGRYANTYKNWFPGPMGRTQGWNLGSGVNRASVSAFATTNRMELEGASYQVPPQPNGMTNNLQGSNTYALENTMIFNSQPANPGTTATYLEGNMLITSESETQPVNRVAYNVGGQMATNNQSSTTAPATGTYNLQEIVPGSVWMERDVYLQGPIWAKIPETGAHFHPSPAMGGFGLKHPPPMMLIKNTPVPGNITSFSDVPVSSFITQYSTGQVTVEMEWELKKENSKRWNPEIQYTNNYNDPQFVDFAPDSTGEYRTARPIGTRYLTRPL

SEQ ID NO: 871 - protein, 724 aa, synthetic construct
  REGION 1..724: note = Description of Artificial Sequence: Synthetic polypeptide
MSFVDHPPDWLEEVGEGLREFLGPEAGPPKPKPNQQHQDQARGLVLPGYNYLGPGNGLDRGEPVNRADEVAREHDISYNEQLEAGDNPYLKYNHADAEFQEKLADDTSFGGNLGKAVFQAKKRVLEPFGLVEEGAKTAPTGKRIDDHFPKRKKARTEEDSKPSTSSDAEAGPSGSQQLQIPAQPASSLGADTMSAGGGGPLGDNNQGADGVGNASGDWHCDSTWMGDRVVTKSTRTWVLPSYNNHQYREIKSGSVDGSNANAYFGYSTPWGYFDFNRFHSHWSPRDWQRLINNYWGFRPRSLRVKIFNIQVKEVTVQDSTTTIANNLTSTVQVFTDDDYQLPYVVGNGTEGCLPAFPPQVFTLPQYGYATLNRDNTENPTERSSFFCLEYFPSKMLRTGNNFEFTYNFEEVPFHSSFAPSQNLFKLANPLVDQYLYRFVSTNNTGGVQFNKNLAGRYANTYKNWFPGPMGRTQGWNLGSGVNRASVSAFATTNRMELEGASYQVPPQPNGMTNNLQGSNTYALENTMIFNSQPANPGTTATYLEGNMLITSESETQPVNRVAYNVGGQMTTNNQSSTTAPATGTYNLQEIVPGSVWMERDVYPQGPIWAKIPETGAHFHPSPAMGGFGLKHPPPMMLIKNTPVPGNITSFSDVPVSSFITQYSTGQVTVEMEWELKKENSKRWNPEIQYTNNYNDPQFVDFAPDSTGEYRTTRPIGTRYLTRPL

SEQ ID NO: 872 - protein, 724 aa, synthetic construct
  REGION 1..724: note = Description of Artificial Sequence: Synthetic polypeptide
MSFVDHPPDWLEEVGEGLREFLGLEAGPPKPKPNQQHQDQARGLVLPGYNYLGPGNGLDRGEPVNRADEVAREHDISYNEQLEAGDNPYLKYNHADAEFQEKLADDTSFGGNLGKAVFQAKKRVLEPFGLVEEGAKTAPTGKRIDDHFPKRKKARTEEDSKPSTSSDAEAGPSGSQQLQIPAQPASSLGADTMSAGGGGPLGDNNQGADGVGNASGDWHCDSTWMGDRVVTKSTRTWVLPSYNNHQYREIKSGSVDGSNANAYFGYSTPWGYFDFNRFHSHWSPRDWQRLINNYWGFRPRSLRVKIFNIQVKEVTVQDSTTTIANNLTSTVQVFTDDDYQLPYVVGNGTEGCLPAFPPQVFTLPQYGYATLNRDNTENPTERSSFLCLEYFPSKMLRTGNNFEFTYNFEEVPFHSSFAPSQNLFKLANPLVDQYLYRFVSTNNTGGVQFNKNLAGRYANTYKNWFPGPMGRTQGWNLGSGVNRASVSAFATTNRMELEGASYQVPPQPNGMTNNLQGSNTYALENTMIFNSQPANPGTTATYLEGNMLITSESETQPVNRVAYNVGGQMATNNQSSTTAPATGTYNLQEIVPGSVWMKRDVYLQGPIWAKIPETGAHFHPSPAMGGFGLKHPPPMMLIKNTPVPGNITSFSDVPVSSFITQYSTGQVTVEMEWELKKENSKRWNPEIQYTNNYNDPQFVDFAPDSTGEYRTTRPIGTRYLTRPL

SEQ ID NO: 873 - protein, 724 aa, synthetic construct
  REGION 1..724: note = Description of Artificial Sequence: Synthetic polypeptide
MSFVDHPPDWLEEVGEGLREFLGLEAGPPKPKPNQQHQDQARGLVLPGYNYLGPGNGLDRGEPVNRADEVAREHDISYNEQLEAGDNPYLKYNHADAEFQEKLADDTSFGGNLGKAVFQAKKRVLEPFGLVEEGAKTAPTGKRIDDHFPKRKKARTEEDSKPSTPSDAEAGPSGSQQLQIPAQPASSLGADTMSAGGGGPLGDNNQGADGVGNASGDWHCDSTWMGDRVVTKSTRTWVLPSYNNHQYREIKSGSVDGSNANAYFGYSTPWGYFDFNRFHSHWSPRDWQRLINNYWGFRPRSLRVKIFNIQVKEVTVQDSTTTIANNLTSTVQVFTDDDYQLPYVVGNGTEGCLPAFPPQVFTLPQYGYATLNRDNTENPTERSSFFCLEYFPSKMLRTGNNFEFTYNFEEVPFHSSFAPSQNLFKLANPLVDQYLYRFVSTNNTGGVQFNKNLAGRYANTYKNWFPGPMGRTQGWNLGSGVNRASVSAFATTNRMELEGASYQVPPQPNGMTNNLQGSNTYALENTMIFNSQPANPGTTATYLEGNMLITSESETQPVNRVAYNVGGQMATNNQSSTTAPATGTYNLQEIVPGSVWMERDVYLQGPIWAKIPETGAHFHPSPAMGGFGLKHPPPMMLIKNTPVPGNITSFSDVPVSSFITQYSTGQVTVEMEWELKKENSKRWNPEIQYTNNYNDPQFVDFAPDSTGEYRTTRPIGTRYLTRPL

SEQ ID NO: 874 - protein, 724 aa, synthetic construct
  REGION 1..724: note = Description of Artificial Sequence: Synthetic polypeptide
MSFVDHPPDWLEEVGEGLREFLGLEAGPPKPKPNQQHQDQARGLVLPGYNYLGPGNGLDRGEPVNRADEVAREHDISYNEQLEAGDNPYLKYNHADAEFQEKLADDTSFGGNLGKAVFQAKKRVLEPFGLVEEGAKTAPTGKRIDDHFPKRKKARTEEDSKPSTSSDAEAGPSGSQQLQIPAQPASSLGADTMSAGGGGPLGDNNQGADGVGNASGDWHCDSTWMGDRVVTKSTRTWVLPSYNNHQYREIKSGSVDGSNANAYFGYSTPWGYFDFNRFHSHWSPRDWQRLINNYWGFRPRSLRVKIFNIQVKEVTVQDSTTTIANNLTSTVQVFTDDDYQLPYVVGNGTEGCLPAFPPQVFTLPQYGYATLNRDNTENPTERSSFFCLEYFPSKMLRTGNNFEFTYNFEEVPFHSSFAPSQNLFKLANPLVDQYLYRFVSTNNTGGVQFNKNLAGRYANTHKNWFPGPMGRTQGWNLGSGVNRASVSAFATTNRMELEGASYQVPPQSNGMTNNLRGSNTYALENTMIFNSQPANPGTTATYLEGNMLITSESETQPVNRVAYNVGGQMATNNQSSTTAPATGTYNLQEIVPGSVWMERDVYLQGPIWAKIPETGAHFHPSPAMGGFGLKHPPPMMLIKNTPVPGNITSFSDVPVSSFITQYSTGQVTVEMEWELKKENSKRWNPEIQYTNNYNDPQFVDFAPDSTGEYRTTRPIGTRYLTRPL

SEQ ID NO: 875 - protein, 724 aa, synthetic construct
  REGION 1..724: note = Description of Artificial Sequence: Synthetic polypeptide
MSFVDHPPDWLEEVGEGLREFLGLEAGPPKPKPNQQHQDQARGLVLPGYNYLGPGNGLDRGEPVNRADEVAREHDISYNEQLEAGDNPYLKYNHADAEFQEKLADDTSFGGNLGKAVFQAKKRVLEPFGLVEEGAKTAPTGKRIDDHFPKRKKARTEEDSKPSTSSDAEAGPSGSQQLQIPAQPASSLGADTMSAGGGGPLGDNNQGADGVGNASGDWHCDSTWMGDRVVTKSTRTWVLPSYNNHQYREIKSGSVDGSNANAYFGYSTPWGYFDFNRFHSHWSPRDWQRLINNYWGFRPRSLRVKIFNIQVKEVTVQDSTTTIANNLTSTVQVFTDDDYQLPYVVGNGTEGCLPAFPPQVFTLPQYGYATLNRDNTENPTERSSFFCLEYFPSKMLRTGNNFEFTYNFEEVPFHSSFAPSQNLFKLANPLVDQYLYRFVSTNNTGGVQFNKNLAGRYANTYKNWFPGPMGRTQGWNLGSGVNRASVSAFATTNRMELEGASYQVPPQPNGMTNNLQGSNTYALENTMIFNSQPANPGTTATYLEGNMLITSESETQPVNRVAYSVGGQMATNNQSSTTAPTTGTYNLQEIVPGSVWMERDVYLQGPIWAKIPETGAHFHPSPAMGGFRLKHPPPMMLIKNTPVPGNITSFSDVPVSSFITQYSTGQVTVEMEWELKKENSKRWNPEIQYTNNYNDPQFVDFAPDSTGEYRTTRPIGTRYLTRPL

SEQ ID NO: 876 - protein, 724 aa, synthetic construct
  REGION 1..724: note = Description of Artificial Sequence: Synthetic polypeptide
MSFVDHPPDWLEEVGEGLREFLGLEAGPPKPKPNQQHQDQARGLVLPGYNYLGPGNGLDRGEPVNRADEVAREHDISYNEQLEAGDNPYLKYNHADAEFQEKLADDTSFGGNLGKAVFQAKKRVLEPFGLVEEGAKTAPTGKRIDDHFPKRKKARTEEDSKPSTSSDAEAGPSGSQQLQIPAQPASSLGADTMSAGGGGPLGDNNQGADGVGNASGDWHCDSTWMGDRVVTKSTRTWVLPSYNNHQYREIKSGSVDGSNANAYFGYSTPWGYFDFNRFHSHWSPRDWQRLINNYWGFRPRSLRVKIFNIQVKEVTVQDSTTTIANNLTSTVQVFTDDDYQLPYVVGNGTEGCLPAFPPQVFTLPQYGYATLNRDNTENPTERSSFFCLEYFPSKMLRTGNNFEFTYNFEEVPFHSSFAPSQNLFKLANPLVDQYLYRFVSTNNTGGVQFNKNLAGRYANTYKNWFPGPMGRTQGWNLGSGVNRASVSAFAATNRMELEGASYQVPPQPNGMTNNLQGSNTYALENTMIFNSQPANPGTTATYLEGNMLITSESETQPVNRVAYNVGGQMATNNQSSTTAPATGTYNLQEIVPGGVWMERDVYLQGPIWAKIPETGAHFHPSPAMGGFGLKHPPPMMLIKNTPVPGNTTSFSDVPVSSFITQYSTGQVTVEMEWELKKENSKRWNPEIQYTNNYNDPQFVDFAPDSTGEYRTTRPIGTRYLTRPL

SEQ ID NO: 877 - protein, 724 aa, synthetic construct
  REGION 1..724: note = Description of Artificial Sequence: Synthetic polypeptide
MSFVDHPPDWLEEVGEGLREFLGLEAGPPKPKPNQQHQDQARGLVLPGYNYLGPGNGLDRGEPVNRADEVAREHDISYNEQLEAGDNPYLKYNHADAEFQEKLADDTSFGGNLGKVVFQAKKRVLEPFGLVEEGAKTAPTGKRIDDHFPKRKKARTEEDSKPSTSSDAEAGPSGSQQLQIPAQPASSLGADTMSAGGGGPLGGNNQGADGVGNASGDWHCDSTWMGDRVVTKSTRTWVLPSYNNHQYREIKSGSVDGSNANAYFGYSTPWGYFDFNRFHSHWGPRDWQRLINNYWGFRPRSLRVKIFNIQVKEVTVQDSTTTIANNLTSTVQVFTDDDYQLPYVVGNGTEGCLPAFPPQVFTLPQYGYATLNRDNTENPTERSSFFCLEYFPSKMLRTGNNFEFTYNFEEVPFHSSFAPSQNLFKLANPLVDQYLYRFVSTNNTGGVQFNKNLAGRYANTYKNWFPGPMGRTQGWNLGSGVNRASVSALATTNRMELEGASYQVPPQPNGMTNNLQGSNTYALENTMIFNSQPANPGTTATYLEGNMLITSESETQPVNRVAYNVGGQMATNNQSSTTAPATGTYNLQEIVPGSVWMERDVYLQGPIWAKIPETGAHFHPSPAMGGFGLKHPPPMMLIKNTPVPGNITSFSDVPVSSFITQYSTGQVTVEMEWELKKENSKRWNPEIQYTNNYNDPQFVDFAPDSTGEYRTTRPIGTRYLTRPL

SEQ ID NO: 878 - protein, 723 aa, synthetic construct
  REGION 1..723: note = Description of Artificial Sequence: Synthetic polypeptide
MSFVDHPPDWLEEVGEGLREFLGLEAGPPKPKPNQQHQDQARGLVLPGYNYLGPGNGLDRGEPVNRADEVAREHDISYNEQLEAGDNPYLKYNHADAEFQEKLADDTSFGGNLGKAVFQAKKRVLEPFGLVEEGAKTAPTGKRIDDHFPKRKKARTEEDSKPSTSSDAEAGPSGSQQLQIPAQPASSLGADTMSAGGGGPLGDNNQGADGVGNASGDWHCDSTWMGDRVVTKSTRTWVLPSYNNHQYREIKSGSVDGSNANAYFGYSTPWGYFDFNRFHSHWSPRDWQRLINNYWGFRPRSLRVKIFNIQVKEVTVQDSTTTIANNLTSTVQVFTDDDYQLPYVVGNGTEGCLPAFPPQVFTLPQYGYATLNRDNTENPTERSSFFCLEYFPSKMLRTGNNFEFTYNFEEVPFHSSFAPSQNLFKLANPLVDQYLYRFVSTNNTGGVQFNKNLAGRYANTYKNWFPGPMGRTQGWNLGSGVNRASVSAFATTNRMELEGASYQVPPQPNGMTNNLQGSNTYALENTMIFNSQPANPGTTATYLEGNMLITSESETQPVNRVAYNVGGQMATNNQSSTTAPATGTYNLQEIVPGSVWMERDVYLQGPIAKIPETGAHFHPSPAMGGFGLKHPPPMMLIKNTPVPGNITSFSDVPVSSFITQYSTGQVTVEMEWELKKENSKRWNPEIQYTNNYNDPQFVDFAPDSTGECRTTRPIGTRYLTRPL

SEQ ID NO: 879 - protein, 724 aa, synthetic construct
  REGION 1..724: note = Description of Artificial Sequence: Synthetic polypeptide
MSFVDHPPDWLEEVGEGLREFLGLEAGPPKPKPNQQHQDQARGLVLPGYNYLGPGNGLDRGEPVNRADEVAREHDISYNEQLEAGDNPYLKYNHADAEFQEKLADDTSFGGNLGKAVFQAKKRVLEPFGLVEEGAKTAPTGKRIDDHFPKRKKARTEEDSKPSTSSDAEAGPSGSQQLQIPAQPASSLGADTMSAGGGGPLGDNNQGADGVGNASGDWHCDSTWMGDRVVTKSTRTWVLPSYNNHQYREIKSGSVDGSNANAYFGYSTPWGYFDFNRFHSHWSPRDWQRLINNYWGFRPRSLRVKILNIQVKEVTVQDSTTTIANNLTSTVQVFTDDDYQLPYVVGNGTEGCLPAFPPQVFTLPQYGYATLNRDNTENPTERSSFFCLEYFPSKMLRTGNNFEFTYNFEEVPFHSSFAPSQNLFKLANPLVGQYLYRFVSTNNTGGVQFNENLAGRYANTYKNWFPGPMGRTQGWNLGSGVNRASVSAFATTNRMELEGASYQVPPQPNGMTNNLQGSNTYALENTMIFNSQPANPGTTATYLEGNMLITSESETQPVNRVAYNVGGQMATNNQSSTTAPATGTYNLQEIVPGSVWMERDVYLQGPIWAKIPETGAHFHPSPAMGGFGLKHPPPMMLIKNTPVPGNITSFSDVPVSSFITQYSTGQATVEMEWELKKENSKRWNPEIQYTNNYNDPQFVDFAPDSTGEYRTTRPIGTRYLTRPL

SEQ ID NO: 880 - protein, 724 aa, synthetic construct
  REGION 1..724: note = Description of Artificial Sequence: Synthetic polypeptide
MSFVDHPPDWLEEVGEGLREFLGLEAGPPKPKPNQQHQDQARGLVLPGYNYLGPGNGLDRGEPVNRADEVAREHDISYNEQLEAGDNPYLKYNHADAEFQEKLADDTSFGGNLGKAVFQAKKRVLEPFGLVEEGAKTAPTGKRIDDHFPKRKKARTEEDSKPSTSSDAEAGPSGSQQLQIPAQPASSLGADTMSAGGGGPLGDNNQGADGVGNASGDWHCDSTWMGDRVVTKSTRTWVLPSYNNHQYREIKSGSVDGSNANAYFGYSTPWGYFDFNRFHSHWSPRDWQRLINNYWGFRPRSLRVKIFNIQVKEVTVQDSTTIIANNLTSTVQVFTDDDYQLPYVVGNGTEGCLPAFPPQVFTLPQYGYATLNRDNTENPTERSSFFCLEYFPSKMLRTGNNFEFTYNFEEVPFHSSFAPSQNLFKLANPLVDQYLYRFVSTNNTGGVQFNKNLAGRYANTYKNWFPGPMGRTQGWNLGSGVNRASVSAFATTNRMELEGASYQVPPQPNGMTNNLQGSNTYALENTMIFNSQPANPGTTATYLEGNMLITSESETQPVNRVAYNVGGQMATNNQSSTTAPATGTYNLQEIVPGSVWMERDVYLQGPIWAKIPETGAHFHPSPAMGGFGLKHPPPMMLIKNTPVPGNITSFSDVPVSSFITQYSTGQVTVEMEWELKKENSKRWNPEIQYTNNYNDPQFVDFAPDSTGEYRTTRPIGTRYLTRPL

SEQ ID NO: 881 - protein, 724 aa, synthetic construct
  REGION 1..724: note = Description of Artificial Sequence: Synthetic polypeptide
MSFVDHPPDWLEEVGEGLREFLGLEAGPPKPKPNQQHQDQARGLVLPGYNYLGPGNGLDRGEPVNRADEVAREHDISYNEQLEAGDNPYLKYNHADAEFQEKLADDTSFGGNLGKAVFQAKKRVLEPFGLVEEGAKTAPTGKRIDDHFPKRKKARTEEDSKPSTSSDAEAGPSGSQQLQIPAQPASSLGADTMSAGGGGPLGDNNQGADGVGNASGDWHCDSTWMGDRVVTKSTRTWVLPSYNNHQYREIKSGSVDGSNANAYFGYSTPWGYFDFNRFHSHWSPRDWQRLINNYWGFRPRSLRVKIFNIQVKEVTVQDSTTTIANNLTSTVQVFTDDDYQLPYVVGNGTEGCLPAFPPQVFTLPQYGYATLNRDNTENPTERSSFFCLEYFPSKMLRTGNNFEFTYNFEEVPFHSSFAPSQNLFKLANPLVDQYLYRFVSTNNTGGVQFNKNLAGRYANTYKNWFPGPMGRTQGWNLGSGVNRASVSAFATTNRMELEGASYQVPPQPNGMTNNLQGSNTYALENTMIFNSQPANPGTTATYLEGNMLITSESETQPVNRVAYNVGGQMATNNQSSTTAPATGTYNLQEIVPGSVWMERDVYLQGPIWAKIPETGAHFHPSPAMGGFGLKHPPPMMLIKNTPVPGNITSLSDVPVSSFITQYSTGQVTVEMEWELKKENSKRWNPEIQYTNNYNDPQFVDFAPDSTGEYRTTRPIGTRYLTRPL

SEQ ID NO: 882 - protein, 724 aa, synthetic construct
  REGION 1..724: note = Description of Artificial Sequence: Synthetic polypeptide
MSFVDHPPDWLEEVGEGLREFLGLEAGPPKPKPNQQHQDQARGLVLPGYNYLGPGNGLDRGEPANRADEVAREHDISYNEQLEAGDNPYLKYNHAGAEFQEKLADDTSFGGNLGKAVFQAKKRVLEPFGLVEEGAKTAPTGKRIDDHFPKRKKARTEEDSKPSTSSDAEAGPSGSQQLQIPAQPASSLGADTMSAGGGGPLGDNNQGADGVGNASGDWHCDSTWMGDRVVTKSTRTWVLPGYNNHQYREIKSGSVDGSNANAYFGYSTPWGYFDFNRFHSHWSPRDWQRLINNYWGFRPRSLRVKIFNIQVKEVTVQDSTTTIANNLTSTVQVFTDDDYQLPYVVGNGTEGCLPAFPPQVFTLPQYGYATLNRDNTENPTERSSFFCLEYFPSKMLRTGNNFEFTYNFEEVPFHSSFAPSQNLFKLANPLVDQYLYRFVSTNNTGGVQFNKNLAGRYANTYKNWFPGPMGRTQGWNLGSGVNRASVSAFATTNRMELEGASYQVPPQPNGMTNNLQGSNTYALENTMIFNSQPANPGTTATYLEGNMLITSESETQPVNRVAYNVGGQMATNNQSSTTAPATGTYNLQEIVPGSVWMERDVYLQGPIWAKIPETGAHFHPSPAMGGFGLKHPPPMMLIKNTPVPGNITSFSDVPVSSFITQYSTGQVTVEMEWELKKENSKRWNPEIQYTNNYNDPQFVDFAPDSTGEYRTTRPIGTRYLTRPL

SEQ ID NO: 883 - protein, 724 aa, synthetic construct
  REGION 1..724: note = Description of Artificial Sequence: Synthetic polypeptide
MSFVDHPPDWLEEVGEGLREFLGLEAGPPKPKPNQQHQDQARGLVLPGYNYLGPGNGLDRGEPVNRADEVAREHDISYNEQLEAGDNPYLKYNHADAEFQEKLADDTSFGGNLGKAVFQAKKRVLEPFGLVEEGAKTAPTGKRIDDHFPKRKKARTEEDSKPPTSSDAEAGPSGSQQLQIPAQPASSLGADTMSAGGGGPLGDNNQGADGVGNASGDWHCDSTWMGDRVVTKSTRTWVLPSYNNHQYREIKSGSVDGSNANAYFGYSTPWGYFDFNRFHSHWSPRDWQRLINNYWGFRPRSLRVKIFNIQVKEVTVQDSATTIANNLTSTVQVFTDDDYQLPYVVGNGTEGCLPAFPPQVFTLPQYGYATLNRDNTENPTERSSFFCLEYFPSKMLRTGNNFEFTYNFEEVPFHSSFAPSQNLFKLANPLVDQYLYRFVSTNNTGGVQFNKNLAGRYANTYKNWFPGPMGRTQGWNLGSGVNRASVSAFATTNRMELEGASYQVPPQPNGMTNNLQGSNTYALENTMIFNSQPANPGTTATYLEGNMLITSESETQPVNRVAYNVGGQMATNNQSSTTAPATGTYNLQEIVPGSVWMERDVYLQGPIWAKIPETGAHFHPSPAMGGFGLKHPPPMMLIKNTPVPGNITSFSDVPVSSFITQYSTGQVTVEMEWELKKENSKRWNPEIQYTNNYNDPQFVDFAPDSTGEYRTTRPIGTRYLTRPL

SEQ ID NO: 884 - protein, 724 aa, synthetic construct
  REGION 1..724: note = Description of Artificial Sequence: Synthetic polypeptide
MSFVDHPPDWLEEVGEGLREFLGLEAGPPKPKPNQQHQDQARGLVLPGYNYLGPGNGLDRGEPVNRADEVAREHDISYNEQLEAGDNPYLKYNHADAEFQEKLADDTSFGGNLGKAVFQAKKRVLEPFGLVEEGAKTAPTGKRIDDHFPKRKKARTEEDSKPSTSSDAEAGPSGSQQPQIPAQPASSLGADTMSAGGGGPLGDNNQGADGVGNASGDWHCDSTWMGDRVVTKSTRTWVLPSYNNHQYREIKSGSVDGSNANAYFGYSTPWGYFDFNRFHSHWSPRDWQRLINNYWGFRPRSLRVKIFNIQVKEVTVQDSTTTIANNLTSTVQVFTDDDYQLPYVVGNGTEGCLPAFPPQVFTLPQYGYATLNRDNTENPTERSSFFCLEYFPSKMLRTGNNFEFTYNFEEVPFHSSFAPSQNLFKLANPLVDQYLYRFVSTNNTGGVQFNKNLAGRYANTYKNWFPGPMGRTQGWNLGSGVNRASVSAFATTNRMELEGASYQVPPQPNGMTNNLQGSNTYALENTMIFNSQPANPGTTATYLEGNMLITSESETQPVNRVAYNVGGQMATNNQSSTTAPATGTYNLQEIVPGSVWMERDVYLQGPIWAKIPETGAHFHPSPAMGGFGLKHPPPMMLIKNTPAPGNITSFSDVPVSSFITQYSTGQVTVEMEWELKKENSKRWNPEIQYTNNYNDPQFVDFAPDSTGEYRTTRPIGTRYLTRPL

SEQ ID NO: 885 - protein, 724 aa, synthetic construct
  REGION 1..724: note = Description of Artificial Sequence: Synthetic polypeptide
MSFVDHPPDWLEEVGEGLREFLGLEAGPPKPKPNQQHQDQARGLVLPGYNYLGPGNGLDRGEPVNRADEVAREHDISYNEQLEAGDNPYLKYNHADAEFQEKLADDTSFGGNLGKAVFQAKKRVLEPFGLVEEGAKTAPTGKRIDDHFPKRKKARTEEDSKPPTSSDAEAGPSGSQQLQIPAQPASSLGADTMSAGGGGPLGDNNQGADGVGNASGDWHCDSTWMGDRVVTKSTRTWVLPSYNNHQYREIKSGSVDGSNANAYFGYSTPWGYFDFNRFHSHWSPRDWQRLINNYWGFRPRSLRVKIFNIQVKEVTVQDSTTTIANNLTSTVQVFTDDDYQLPYVVGNGTEGCLPAFPPQVFTLPQYGYATLNRDNTENPTERSSFFCLEYFPSKMLRTGNNFEFTYNFEEVPFHSSFAPSQNLFKLANPLVDQYLYRFVSTNNTGGVQFNKNLAGRYANTYKNWFPGPMGRTQGWNLGSGVNRASVSAFATTNRMELEGASYQVPPQPNGMTNNLQGSNTYALENTMIFNSQPANPGTTATYLEGNMLITSESETQPVNRVAYNVGGQMATNNQSSTTAPATGTYNLQEIVPGSVWMERDVYLQGPIWAKIPETGAHFHPSPAMGGFGLKHPPPMMLIKNTPVPGNITSFSDVPVSSFITQYSTGQVTVEMEWELKKENSKRWNPEIQYTNNYNDPQFVDFAPDSTGEYRTTRPIGTRYLTRPL

SEQ ID NO: 886 - protein, 724 aa, synthetic construct
  REGION 1..724: note = Description of Artificial Sequence: Synthetic polypeptide
MSFVDHPPDWLEEVGEGLREFLGLEAGPPKPKPNQQHQDQARGLVLPGYNYLGPGNGLDRGEPVNRADEVAREHDISYNEQLEAGDNPYLKYNHADAEFQEKLADDTSFGGNLGKAVFQAKKRVLEPFGLVEEGAKTAPTGKRIDDHFPKRKKARTEEDSKPPTSSDAEAGPSGSQQLQIPAQPASSLGADTMSAGGGGPLGDNNQGADGVGNASGDWHCDSTWMGDRVVTKSTRTWVPPSYNNHQYREIKSGSVDGSNANAYFGYSTPWGYFDFNRFHSHWSPRDWQRLINNYWGFRPRSLRVKIFNIQVKEVTVQDSTTTIANNLTSTVQVFTDDDYQLPYVVGNGTEGCLPAFPPQVFTLPQYGYATLNRDNTENPTERSSFFCLEYFPSKMLRTGNNFEFTYNFEEVPFHSSFAPSQNLFKLANPLVDQYLYRFVSTNNTGGVQFNKNLAGRYANTYKNWFPGPMGRTQGWNLGSGVNRASVSAFATTNRMELEGASYQVPPQPNGMTNNLQGSNTYALENTMIFNSQPANPGTTATYLEGNMLITSESETQPVNRVAYNVGGQMATNNQSSTTAPATGTYNLQEIVPGSVWMERDVYLQGPIWAKIPETGAHFHPSPAMGGFGLKHPPPMMLIKNTPVPGNITSFSDVPVSSFITQYSTGQVAVEMEWELKKENSKRWNPEIQYTNNYNDPQFVDFAPDSTGEYRTTRPIGTRYLTRPL

SEQ ID NO: 887 - protein, 724 aa, synthetic construct
  REGION 1..724: note = Description of Artificial Sequence: Synthetic polypeptide
MSFVDHPPDWLEEVGEGLREFLGLEAGPPKPKPNQQHQDQARGLVLPGYNYLGPGNGLDRGEPVNRADEVAREHDISYNEQLEAGDNPYLKYNHADAEFQEKLADDTSFGGNLGKAVFQAKKRVLEPFGLVEEGAKTAPTGKRIDDHFPKRKKARTEEDSKPSTSSDAEAGPSGSQQLQIPAQPASSLGADTMSAGGGGPLGDNNQGADGVGNASGDWHCDSTWMGDRVVTKSTRTWVLPSYNNHQYREIKSGSVDGSNANAYFGYSTPWGYFDFNRFHSHWSPRDWQRLINNYWGFRPRSLRVKIFNIQVKEVTVQDSTTTIANNLTSTVQVFTDDDYQLPYVVGNGTEGCLPAFPPQVFTLPQYGYATLNRDNTENPTERSSFFCLEYFPSKMLRTGNNFEFTYNFEEVPFHSSFAPSQNLFKLANPLVDQYLYRFVSTNNTGGVQFNKNLAGRYANTYKNWFPGPMGRTQGWNLGSGVNRASVSAFATTNRMELEGASYQVPPQPNGMTNNLQGSNTYALENTMIFNSQPANPGTTATYLEGNMLITSESETQPVNRVAYNVGGQMATNNQSSTTAPATGTYNLQEIVPGSVWMERDVYLQGPIWAKIPETGAHFHPSPAMGGFGLKHPPPMMLIKNTPAPGNITSFSDVPVSSFITQYSTGQVTVEMEWELKKENSKRWNPEIQYTNNYNDPQFVDFAPDSTGEYRTTRPIGTRYLTRPL

SEQ ID NO: 888 - protein, 724 aa, synthetic construct
  REGION 1..724: note = Description of Artificial Sequence: Synthetic polypeptide
MSFVDHPPDWLEEVGEGLREFLGLEAGPPKPKPNQQHQDQARGLVLPGYNYLGPGNGLDRGEPVNRADEVAREHDISYNEQLEAGDNPYLKYNHADAEFQEKLADDTSFGGNLGKAVFQAKKRVLEPFGLAEEGAKTAPTGKRIDDHFPKRKKARTEEDSKPSTSSDAEAGPSGSQQLQIPAQPASSLGADTMSAGGGGPLGDNNQGADGVGNASGDWHCDSTWMGDRVVTKSTRTWVLPSYNNHQYREIKSGSVDGSNANAYFGYSTPWGYFDFNRFHSHWSPRDWQRLINNYWGFRPRSLRAKIFNIQVKEVTVQDSTTTIANNLTSTVQVFTDDDYQLPYVVGNGTEGCLPAFPPQVFTLPQYGYATLNRDNTENPTERSSFFCLEYFPSKMLRTGNNLEFTYNFEEVPFHSSFAPSQNLFKLANPLVDQYLYRFVSTNNTGGVQFNKNLAGRYANTYKNWFPGPMGRTQGWNLGSGVNRASVSAFATTNRMELEGASYQVPPQPNGMTNNLQGSNTYALENTMIFNSQPANPGTTATYLEGNMLITSESETQPVNRVVHNVGGQMATNNQSSTTAPATGTYNLQEIVPGSVWMERDVYLQGPIWAKIPETGAHFHPSPAMGGFGLKHPPPMMLIKNTPVPGNITSFSDVPVSSFITQYSTGQVTVEMEWELKKENSKRWNPEIQYTNNYNDPQFVDFAPDSTGEYRTTRPIGTRYLTRPL

SEQ ID NO: 889 - protein, 724 aa, synthetic construct
  REGION 1..724: note = Description of Artificial Sequence: Synthetic polypeptide
MSFVDHPPDWLEEVGEGLREFLGLEAGPPKPKPNQQHQDQARGLVLPGYNYLGPGNGLDRGEPVNRADEVAREHDISYNEQLEAGDNPYLKYNHADAEFQEKLADDTSFGGNLGKAVFQAKKRVLEPFGLVEEGAKTAPTGKRIDDHFPKRKKARTEEDSKPSTSSDAEAGPSGSQQLQIPAQPASSLGADTMSAGGGGPLGDNNQGADGVGNASGDWHCDSTWMGDRVVTKSTRTWVLPSYNNHQYREIKSGSVDGGNANAYFGYSTPWGYFDFNRFHSHWSPRDWQRLINNYWGFRPRSLRVKIFNIQVKEVTVQDSTTTIANNLTSTVQVFTDDDYQLPYVVGNGTEGCLPAFPPQVFTLPQYGYATLNRDNTENPTERSSFFCLEYFPSKMLRTGNNFEFTYNFEEVPFHSSFAPSQNLFKLANPLVDQYLYRFVSTNNTGGVQFNKNLAGRYANTYKNWFPGPMGRTQGWNLGSGVNRASVSAFATTNRMELEGASYQVPPQPNGMTNNLQGSNTYALENTMIFNSQPANPGTTATYLEGNMLITSESETQPVNRVAYNVGGQMATNNQSSTTAPATGTYNLQEIVPGSVWMERDVYLQGPIWAKIPETGAHFHPSPAMGGFGLKHPPPMMLIKNTPAPGNITSFSDVPVSSFITQYSTGQVTVEMEWELKKGNSKRWNPEIQYTNNYNDPQFVDFAPDSTGEYRTTRPIGTRYLTRPL

SEQ ID NO: 890 - protein, 724 aa, synthetic construct
  REGION 1..724: note = Description of Artificial Sequence: Synthetic polypeptide
MSFVDHPPDWLEEVGEGLREFLGLEAGPPKPKPNQQHQDQARGLVLPGYNYLGPGNGLDRGEPVNRADEVAREHDISYNEQLEAGDNPYLKYNHADAEFQEKLADDTSFGGNLGKAVFQAKKRVLEPFGLVEEGAKTAPTGKRIDDHFPKRKKARTEEDSKPSTSSDAEAGPSGSQQLQIPAQPASSLGADTMSAGGGGPLGDNNQGADGVGNASGDWHCDSTWMGDRVVTKSTRTWVLPSYNNHQYREIKSGSVDGSNANAYFGYSTPWGYFDFNRFHSHWSPRDWQRLINNYWGFRPRSLRVKIFNIQVKEVTVQDSTTTIANNLTSTVQVFTDDDYQLPYVVGNGTEGCLPAFPPQVFTLPQYGYATLNRDNTENPTERSSFFCLEYFPSKMLRTGNNFEFTYNFEEVPFHSSFAPSQNLFKLANPLVDQYLYRFVSTNNTGGVQFNKNLAGRYANTYKNWFPGPMGRTQGWNLGSGVNRASVSAFATTNRMELEGASYQVPPQPNGMTNNLQGSNTYALENTMIFNSQPANPGTTATYLEGNMLITSESETQPVNRVAYNVGGQMATNNQSSTTAPATGTYNLQEIVPGSVWMERDVYLQGPIWAKIPETGVHFHPSPAMGGFGLKHPPPMMLIKNTPVPGNITSFSDVPVSSFITQYSTGQVTVEMEWELKKENSKRWNPEIQYTNNYNDPQFVDFAPDSTGEYRTTRPIGTRYLTRPL

SEQ ID NO: 891 - protein, 724 aa, synthetic construct
  REGION 1..724: note = Description of Artificial Sequence: Synthetic polypeptide
  VARIANT 551: note = MOD_RES - Any amino acid
MSFVDHPPDWLEEVGEGLREFLGLEAGPPKPKPNQQHQDQARGLVLPGYNYLGPGNGLDRGEPVNRADEVAREHDISYNEQLEAGDNPYLKYNHADAEFQEKLADDTSFGGNLGKAVFQAKKRVLEPFGLVEEGAKTAPTGKRIDDHFPKRKKARTEEDSKPSTSSDAEAGPSGSQQLQIPAQPASSLGADTMSAGGGGPLGDNNQGADGVGNASGDWHCDSTWMGDRVVTKSTRTWVLPSYNNHQYREIKSGSVDGSNANAYFGYSTPWGYFDFNRFHSHWSPRDWQRLINNYWGFRPRSLRVKIFNIQVKEVTVQDSTTTIANNLTSTVQVFTDDDYQLPYVVGNGTEGCLPAFPPQVFTLPQYGYATLNRDNTENPTERSSFFCLEYFPSKMLRTGNNFEFTYNFEEVPFHSSFAPSQNLFKLANPLVDQYLYRFVSTNNTGGVQFNKNLAGRYANTYKNWFPGPMGRTQGWNLGSGVNRASVSAFATTNRMELEGASYQVPPQPNGMTNNLQGSNTYALENTMIFNSQPANPGTTATYLEGSMLITXESETQPVNRVAYNVGGQMATNNQSSTTAPATGTYNLQEIVPGSVWMERDVYLQGPIWAKIPETGAHFHPSPAMGGFGLKHPPPMMLIKNTPVPGNITSFSDVPVSSFITQYSTGQVTVEMEWELKKENSKRWNPEIQYTNNYNDPQFVDFAPDSTGEYRTTRPIGTRYLTRPL

SEQ ID NO: 892 - protein, 736 aa, synthetic construct; identical to SEQ ID NO: 66
  REGION 1..736: note = Description of Artificial Sequence: Synthetic polypeptide

SEQ ID NO: 893 - protein, 734 aa, synthetic construct; identical to SEQ ID NO: 84
  REGION 1..734: note = Description of Artificial Sequence: Synthetic polypeptide

SEQ ID NO: 894 - protein, 723 aa, synthetic construct
  REGION 1..723: note = Description of Artificial Sequence: Synthetic polypeptide
MSFVDHPPDWLEEVGEGLREFLGLEAGPPKPKPNQQHQDQARGLVLPGYNYLGPGNGLDRGEPVNRADEVAREHDISYNEQLEAGDNPYLKYNHADAEFQEKLADDTSFGGNLGKAVFQAKKRVLEPFGLVEEGAKTAPTGKRIDDHFPKRKKARTEEDSKPSTSSDAEAGPSGSQQLQIPAQPASSLGADTMSAGGGPLGDNNQGADGVGNASGDWHCDSTWMGDRVVTKSTRTWVLPSYNNHQYREIKSGSVDGSNANAYFGYSTPWGYFDFNRFHSHWSPRDWQRLINNYWGFRPRSLRVKIFNIQVKEVTVQDSTTTIANNLTSTVQVFTDDDYQLPYVVGNGTEGCLPAFPPQVFTLPQYGYATLNRDNTENPTERSSFFCLEYFPSKMLRTGNNFEFTYNFEEVPFHSSFAPSQNLFKLANPLVDQYLYRFVSTNNTGGVQFNKNLAGRYANTYKNWFPGPMGRTQGWNLGSGVNRASVSAFATTNRMELEGASYQVPPQPNGMTNNLQGSNTYALENTMIFNSQPANPGTTATYLEGNMLITSESETQPVNRVAYNVGGQMATNNQSSTTAPATGTYNLQEIVPGSVWMERDVYLQGPIWAKIPETGAHFHPSPAMGGFGLKHPPPMMLIKNTPVPGNITSFSDVPVSSFITQYSTGQVTVEMEWELKKENSKRWNPEIQYTNNYNDPQFVDFAPDSTGEYRTTRPIGTRYLTRPL

SEQ ID NO: 895 - protein, 743 aa, synthetic construct
  REGION 1..743: note = Description of Artificial Sequence: Synthetic polypeptide
MAADGYLPDWLEDNLSEGIREWWALKPGAPQPKANQQHQDNARGLVLPGYKYLGPGNGLDKGEPVNAADAAALEHDKAYDQQLKAGDNPYLKYNHADAEFQERLKEDTSFGGNLGRAVFQAKKRLLEPLGLVEEAAKTAPGKKRPVEQSPQEPDSSAGIGKSGAQPAKKRLNFGQTGDTESVPDPQPIGEPPAAPSGVGSLTMASGGGAPVADNNEGADGVGSSSGNWHCDSQWLGDRVITTSTRTWALPTYNNHLYKQISNSTSGGSSNDNAYFGYSTPWGYFDFNRFHCHFSPRDWQRLINNNWGFRPKRLNFKLFNIQVKEVTDNNGVKTIANNLTSTVQVFTDSDYQLPYVLGSAHEGCLPPFPADVFMIPQYGYLTLNDGSQAVGRSSFYCLEYFPSQMLRTGNNFQFSYEFENVPFHSSYAHSQSLDRLMNPLIDQYLYYLSRTINGSGQNQQTLKFSVAGPSNMAVQGRNYIPGPSYRQQRVSTTVTQNNNSEFAWPGASSWALNGRNSLMNPGPAMASHKEGEDRFFPLSGSLIFGKQGTGRDNVDADKVMITNEEEIKTTNPVATESYGQVATNHQSAQTLAVPFKAQAQTGWVQNQGILPGMVWQDRDVYLQGPIWAKIPHTDGNFHPSPLMGGFGMKHPPPQILIKNTPVPADPPTAFNKDKLNSFITQYSTGQVSVEIEWELQKENSKRWNPEIQYTSNYYKSNNVEFAVNTEGVYSEPRPIGTRYLTRNL

SEQ ID NO: 896 - DNA, 2232 bp, synthetic construct
  misc_feature 1..2232: note = Description of Artificial Sequence: Synthetic polynucleotide
  source 1..2232: mol_type = other DNA
atggctgccgatggttatcttccagattggctcgaggacaaccttagtgaaggaattcgcgagtggtgggctttgaaacctggagcccctcaacccaaggcaaatcaacaacatcaagacaacgctcgaggtcttgtgcttccgggttacaaataccttggacccggcaacggactcgacaagggggagccggtcaacgcagcagacgcggcggccctcgagcacgacaaggcctacgaccagcagctcaaggccggagacaacccgtacctcaagtacaaccacgccgacgccgagttccaggagcggctcaaagaagatacgtcttttgggggcaacctcgggcgagcagtcttccaggccaaaaagaggcttcttgaacctcttggtctggttgaggaagcggctaagacggctcctggaaagaagaggcctgtagagcagtctcctcaggaaccggactcctccgcgggtattggcaaatcgggtgcacagcccgctaaaaagagactcaatttcggtcagactggcgacacagagtcagtcccagaccctcaaccaatcggagaacctcccgcagccccctcaggtgtgggatctcttacaatggcttcaggtggtggcgcaccagtggcagacaataacgaaggtgccgatggagtgggtagttcctcgggaaattggcattgcgattcccaatggctgggggacagagtcatcaccaccagcacccgaacctgggccctgcccacctacaacaatcacctctacaagcaaatctccaacagcacatctggaggatcttcaaatgacaacgcctacttcggctacagcaccccctgggggtattttgacttcaacagattccactgccacttctcaccacgtgactggcagcgactcatcaacaacaactggggattccggcctaagcgactcaacttcaagctcttcaacattcaggtcaaagaggttacggacaacaatggagtcaagaccatcgccaataaccttaccagcacggtccaggtcttcacggactcagactatcagctcccgtacgtgctcgggtcggctcacgagggctgcctcccgccgttcccagcggacgttttcatgattcctcagtacgggtatctgacgcttaatgatggaagccaggccgtgggtcgttcgtccttttactgcctggaatatttcccgtcgcaaatgctaagaacgggtaacaacttccagttcagctacgagtttgagaacgtacctttccatagcagctacgctcacagccaaagcctggaccgactaatgaatccactcatcgaccaatacttgtactatctctctagaactattaacggttctggacagaatcaacaaacgctaaaattcagtgtggccggacccagcaacatggctgtccagggaagaaactacatacctggacccagctaccgacaacaacgtgtctcaaccactgtgactcaaaacaacaacagcgaatttgcttggcctggagcttcttcttgggctctcaatggacgtaatagcttgatgaatcctggacctgctatggccagccacaaagaaggagaggaccgtttctttcctttgtctggatctttaatttttggcaaacaaggtaccggcagagacaacgtggatgcggacaaagtcatgataaccaacgaagaagaaattaaaactactaacccggtagcaacggagtcctatggacaagtggccacaaaccaccagagtgcccaaactttggcggtgccttttaaggcacaggcgcagaccggttgggttcaaaaccaaggaatacttccgggtatggtttggcaggacagagatgtgtacctgcaaggacccatttgggccaaaattcctcacacggacggcaactttcacccttctccgctgatgggagggtttggaatgaagcacccgcctcctcagatcctcatcaaaaacacacctgtacctgcggatcctccaacggccttcaacaaggacaagctgaactctttcatcacccagtattctactggccaagtcagcgtggagatcgagtgggagctgcagaaggaaaacagcaagcgctggaacccggagatccagtacacttccaactattacaagtctaataatgttgaatttgctgttaatactgaaggtgtatatagtgaaccccgccccattggcaccagatacctgactcgtaatctgtaa

SEQ ID NO: 897 - protein, 736 aa, synthetic construct
  REGION 1..736: note = Description of Artificial Sequence: Synthetic polypeptide
MAADGYLPDWLEDNLSEGIREWWALKPGAPQPKANQQHQDNARGLVLPGYKYLGPGNGLDKGEPVNAADAAALEHDKAYDQQLKAGDNPYLKYNHADAEFQERLKEDTSFGGNLGRAVFQAKKRLLEPLGLVEEAAKTAPGKKRPVEQSPQEPDSSAGIGKSGAQPAKKRLNFGQTGDTESVPDPQPIGEPPAAPSGVGSLTMASGGGAPVADNNEGADGVGSSSGNWHCDSQWLGDRVITTSTRTWALPTYNNHLYKQISNSTSGGSSNDNAYFGYSTPWGYFDFNRFHCHFSPRDWQRLINNNWGFRPKRLNFKLFNIQVKEVTDNNGVKTIANNLTSTVQVFTDSDYQLPYVLGSAHEGCLPPFPADVFMIPQYGYLTLNDGSQAVGRSSFYCLEYFPSQMLRTGNNFQFSYEFENVPFHSSYAHSQSLDRLMNPLIDQYLYYLSRTIQSSQTPRQTLKFSVAGPSNMAVQGRNYIPGPSYRQQRVSTTVTQNNNSEFAWPGASSWALNGRNSLMNPGPAMASHKEGEDRFFPLSGSLIFGKQGTGRDNVDADKVMITNEEEIKTTNPVATESYGQVATNHQSAQAQAQTGWVQNQGILPGMVWQDRDVYLQGPIWAKIPHTDGNFHPSPLMGGFGMKHPPPQILIKNTPVPADPPTAFNKDKLNSFITQYSTGQVSVEIEWELQKENSKRWNPEIQYTSNYYKSNNVEFAVNTEGVYSEPRPIGTRYLTRNL

SEQ ID NO: 898 - protein, 743 aa, synthetic construct
  REGION 1..743: note = Description of Artificial Sequence: Synthetic polypeptide
MAADGYLPDWLEDNLSEGIREWWALKPGAPQPKANQQHQDNARGLVLPGYKYLGPGNGLDKGEPVNAADAAALEHDKAYDQQLKAGDNPYLKYNHADAEFQERLKEDTSFGGNLGRAVFQAKKRLLEPLGLVEEAAKTAPGKKRPVEQSPQEPDSSAGIGKSGAQPAKKRLNFGQTGDTESVPDPQPIGEPPAAPSGVGSLTMASGGGAPVADNNEGADGVGSSSGNWHCDSQWLGDRVITTSTRTWALPTYNNHLYKQISNSTSGGSSNDNAYFGYSTPWGYFDFNRFHCHFSPRDWQRLINNNWGFRPKRLNFKLFNIQVKEVTDNNGVKTIANNLTSTVQVFTDSDYQLPYVLGSAHEGCLPPFPADVFMIPQYGYLTLNDGSQAVGRSSFYCLEYFPSQMLRTGNNFQFSYEFENVPFHSSYAHSQSLDRLMNPLIDQYLYYLSRTIILGTGTSQTLKFSVAGPSNMAVQGRNYIPGPSYRQQRVSTTVTQNNNSEFAWPGASSWALNGRNSLMNPGPAMASHKEGEDRFFPLSGSLIFGKQGTGRDNVDADKVMITNEEEIKTTNPVATESYGQVATNHQSAQTRTNPEAAQAQTGWVQNQGILPGMVWQDRDVYLQGPIWAKIPHTDGNFHPSPLMGGFGMKHPPPQILIKNTPVPADPPTAFNKDKLNSFITQYSTGQVSVEIEWELQKENSKRWNPEIQYTSNYYKSNNVEFAVNTEGVYSEPRPIGTRYLTRNL

SEQ ID NO: 899 - protein, 743 aa, synthetic construct
  REGION 1..743: note = Description of Artificial Sequence: Synthetic polypeptide
MAADGYLPDWLEDNLSEGIREWWALKPGAPQPKANQQHQDNARGLVLPGYKYLGPGNGLDKGEPVNAADAAALEHDKAYDQQLKAGDNPYLKYNHADAEFQERLKEDTSFGGNLGRAVFQAKKRLLEPLGLVEEAAKTAPGKKRPVEQSPQEPDSSAGIGKSGAQPAKKRLNFGQTGDTESVPDPQPIGEPPAAPSGVGSLTMASGGGAPVADNNEGADGVGSSSGNWHCDSQWLGDRVITTSTRTWALPTYNNHLYKQISNSTSGGSSNDNAYFGYSTPWGYFDFNRFHCHFSPRDWQRLINNNWGFRPKRLNFKLFNIQVKEVTDNNGVKTIANNLTSTVQVFTDSDYQLPYVLGSAHEGCLPPFPADVFMIPQYGYLTLNDGSQAVGRSSFYCLEYFPSQMLRTGNNFQFSYEFENVPFHSSYAHSQSLDRLMNPLIDQYLYYLSRTIILGTGTSQTLKFSVAGPSNMAVQGRNYIPGPSYRQQRVSTTVTQNNNSEFAWPGASSWALNGRNSLMNPGPAMASHKEGEDRFFPLSGSLIFGKQGTGRDNVDADKVMITNEEEIKTTNPVATESYGQVATNHQSAQNGGTSSSAQAQTGWVQNQGILPGMVWQDRDVYLQGPIWAKIPHTDGNFHPSPLMGGFGMKHPPPQILIKNTPVPADPPTAFNKDKLNSFITQYSTGQVSVEIEWELQKENSKRWNPEIQYTSNYYKSNNVEFAVNTEGVYSEPRPIGTRYLTRNL

SEQ ID NO: 900 - protein, 7 aa, synthetic construct
  REGION 1..7: note = Description of Artificial Sequence: Synthetic peptide
TLAVPFK

SEQ ID NO: 901 - protein, 7 aa, synthetic construct
  REGION 1..7: note = Description of Artificial Sequence: Synthetic peptide
KFPVALT

SEQ ID NO: 902 - protein, 6 aa, synthetic construct
  REGION 1..6: note = Description of Artificial Sequence: Synthetic peptide
LAVPFK

SEQ ID NO: 903 - protein, 5 aa, synthetic construct
  REGION 1..5: note = Description of Artificial Sequence: Synthetic peptide
AVPFK

SEQ ID NO: 904 - protein, 4 aa, synthetic construct
  REGION 1..4: note = Description of Artificial Sequence: Synthetic peptide
VPFK

SEQ ID NO: 905 - protein, 6 aa, synthetic construct
  REGION 1..6: note = Description of Artificial Sequence: Synthetic peptide
TLAVPF

SEQ ID NO: 906 - protein, 5 aa, synthetic construct
  REGION 1..5: note = Description of Artificial Sequence: Synthetic peptide
TLAVP

SEQ ID NO: 907 - protein, 4 aa, synthetic construct
  REGION 1..4: note = Description of Artificial Sequence: Synthetic peptide
TLAV

SEQ ID NO: 908 - protein, 7 aa, synthetic construct
  REGION 1..7: note = Description of Artificial Sequence: Synthetic peptide
SVSKPFL

SEQ ID NO: 909 - protein, 7 aa, synthetic construct
  REGION 1..7: note = Description of Artificial Sequence: Synthetic peptide
FTLTTPK

SEQ ID NO: 910 - protein, 7 aa, synthetic construct
  REGION 1..7: note = Description of Artificial Sequence: Synthetic peptide
MNATKNV

SEQ ID NO: 911 - protein, 7 aa, synthetic construct
  REGION 1..7: note = Description of Artificial Sequence: Synthetic peptide
QSSQTPR

SEQ ID NO: 912 - protein, 7 aa, synthetic construct
  REGION 1..7: note = Description of Artificial Sequence: Synthetic peptide
ILGTGTS

SEQ ID NO: 913 - protein, 7 aa, synthetic construct
  REGION 1..7: note = Description of Artificial Sequence: Synthetic peptide
TRTNPEA

SEQ ID NO: 914 - protein, 7 aa, synthetic construct
  REGION 1..7: note = Description of Artificial Sequence: Synthetic peptide
NGGTSSS

SEQ ID NO: 915 - protein, 7 aa, synthetic construct
  REGION 1..7: note = Description of Artificial Sequence: Synthetic peptide
YTLSQGW

SEQ ID NO: 916 - DNA, 21 bp, synthetic construct
  misc_feature 1..21: note = Description of Artificial Sequence: Synthetic oligonucleotide
  source 1..21: mol_type = other DNA
aagtttcctgtggcgttgact

SEQ ID NO: 917 - DNA, 21 bp, synthetic construct
  misc_feature 1..21: note = Description of Artificial Sequence: Synthetic oligonucleotide
  source 1..21: mol_type = other DNA
actttggcggtgccttttaag

SEQ ID NO: 918 - DNA, 21 bp, synthetic construct
  misc_feature 1..21: note = Description of Artificial Sequence: Synthetic oligonucleotide
  source 1..21: mol_type = other DNA
agtgtgagtaagccttttttg

SEQ ID NO: 919 - DNA, 21 bp, synthetic construct
  misc_feature 1..21: note = Description of Artificial Sequence: Synthetic oligonucleotide
  source 1..21: mol_type = other DNA
tttacgttgacgacgcctaag

SEQ ID NO: 920 - DNA, 21 bp, synthetic construct
  misc_feature 1..21: note = Description of Artificial Sequence: Synthetic oligonucleotide
  source 1..21: mol_type = other DNA
atgaatgctacgaagaatgtg

SEQ ID NO: 921 - DNA, 21 bp, synthetic construct
  misc_feature 1..21: note = Description of Artificial Sequence: Synthetic oligonucleotide
  source 1..21: mol_type = other DNA
cagtcgtcgcagacgcctagg

SEQ ID NO: 922 - DNA, 21 bp, synthetic construct
  misc_feature 1..21: note = Description of Artificial Sequence: Synthetic oligonucleotide
  source 1..21: mol_type = other DNA
attctggggactggtacttcg

SEQ ID NO: 923 - DNA, 21 bp, synthetic construct
  misc_feature 1..21: note = Description of Artificial Sequence: Synthetic oligonucleotide
  source 1..21: mol_type = other DNA
acgcggactaatcctgaggct

SEQ ID NO: 924 - DNA, 21 bp, synthetic construct
  misc_feature 1..21: note = Description of Artificial Sequence: Synthetic oligonucleotide
  source 1..21: mol_type = other DNA
aatggggggactagtagttct

SEQ ID NO: 925 - DNA, 21 bp, synthetic construct
  misc_feature 1..21: note = Description of Artificial Sequence: Synthetic oligonucleotide
  source 1..21: mol_type = other DNA
tatactttgtcgcagggttgg

SEQ ID NO: 926 - protein, 9 aa, synthetic construct
  REGION 1..9: note = Description of Artificial Sequence: Synthetic peptide
SADNNNSEY

SEQ ID NO: 927 - protein, 9 aa, synthetic construct
  REGION 1..9: note = Description of Artificial Sequence: Synthetic peptide
LIDQYLYYL

SEQ ID NO: 928 - protein, 9 aa, synthetic construct
  REGION 1..9: note = Description of Artificial Sequence: Synthetic peptide
VPQYGYLTL

SEQ ID NO: 929 - protein, 9 aa, synthetic construct
  REGION 1..9: note = Description of Artificial Sequence: Synthetic peptide
TTSTRTWAL

SEQ ID NO: 930 - protein, 9 aa, synthetic construct
  REGION 1..9: note = Description of Artificial Sequence: Synthetic peptide
YHLNGRDSL

SEQ ID NO: 931 - protein, 9 aa, synthetic construct
  REGION 1..9: note = Description of Artificial Sequence: Synthetic peptide
SQAVGRSSF

SEQ ID NO: 932 - protein, 9 aa, synthetic construct
  REGION 1..9: note = Description of Artificial Sequence: Synthetic peptide
VPANPSTTF

SEQ ID NO: 933 - protein, 9 aa, synthetic construct
  REGION 1..9: note = Description of Artificial Sequence: Synthetic peptide
FPQSGVLIF

SEQ ID NO: 934 - protein, 15 aa, synthetic construct
  REGION 1..15: note = Description of Artificial Sequence: Synthetic peptide
YFDFNRFHCHFSPRD

SEQ ID NO: 935 - protein, 15 aa, synthetic construct
  REGION 1..15: note = Description of Artificial Sequence: Synthetic peptide
VGNSSGNWHCDSTWM

SEQ ID NO: 936 - protein, 15 aa, synthetic construct
  REGION 1..15: note = Description of Artificial Sequence: Synthetic peptide
QFSQAGASDIRDQSR

SEQ ID NO: 937 - protein, 13 aa, synthetic construct
  REGION 1..13: note = Description of Artificial Sequence: Synthetic peptide
GASDIRQSRNWLP

SEQ ID NO: 938 - protein, 15 aa, synthetic construct
  REGION 1..15: note = Description of Artificial Sequence: Synthetic peptide
GNRQAATADVNTQGV

SEQ ID NO: 939 - protein, 9 aa, synthetic construct
  REGION 1..9: note = Description of Artificial Sequence: Synthetic peptide
LDRLMNPLI

SEQ ID NO: 940 - protein, 9 aa, synthetic construct
  REGION 1..9: note = Description of Artificial Sequence: Synthetic peptide
QPAKKRLNF

SEQ ID NO: 941 - protein, 7 aa, synthetic construct
  REGION 1..7: note = Description of Artificial Sequence: Synthetic peptide
QAVRTSL

SEQ ID NO: 942 - protein, 7 aa, synthetic construct
  REGION 1..7: note = Description of Artificial Sequence: Synthetic peptide
LAKERLS
